(19) United States
(12) Patent Application Publication
(10) Pub. No.: US 2023/0048166 A1
(43) Pub. Date: Feb. 16, 2023

(54) FUSOSOME COMPOSITIONS FOR HEMATOPOIETIC STEM CELL DELIVERY

(71) Applicant: FLAGSHIP PIONEERING INNOVATIONS V, INC., Cambridge, MA (US)

(72) Inventors: Geoffrey A. von Maltzahn, Somerville, MA (US); Jacob Rosenblum Rubens, Cambridge, MA (US); Jagesh Vijaykumar Shah, Lexington, MA (US); Albert Ruzo Matias, Brookline, MA (US); Ferdinando Pucci, Portland, OR (US); John Miles Milwid, Denver, CO (US); Michael Travis Mee, Montreal (CA); Neal Francis Gordon, Brookline, MA (US)

(21) Appl. No.: 17/293,797

(22) PCT Filed: Nov. 14, 2019
(86) PCT No.: PCT/US2019/061389

§ 371 Date: May 13, 2021

Related U.S. Application Data
(60) Provisional application No. 62/900,040, filed on Sep. 13, 2019.
(60) Provisional application No. 62/767,287, filed on Nov. 14, 2018.

(51) Int. Cl. A61K 35/76; C12N 15/88; C12N 5/0789; A61P 7/06

(52) U.S. Cl. CPC A61K 35/76; C12N 15/88; A61K 31/7105; A61P 7/06; C12N 5/0647

(57) ABSTRACT

The present disclosure provides, at least in part, methods and compositions for in vivo fusosome delivery. In some embodiments, the fusosome comprises a combination of elements that promote specificity for target cells, e.g., one or more of a fusogen, a positive target cell-specific regulatory element, and a non-target cell-specific regulatory element. In some embodiments, the fusosome comprises one or more modifications that decrease an immune response against the fusosome.

### CROSS-REFERENCE TO RELATED APPLICATIONS

[0001] This application claims priority to U.S. provisional applications 62/767,287, filed Nov. 14, 2018, entitled “FUSOSOME COMPOSITIONS FOR HEMATOPOIETIC STEM CELL DELIVERY”; and 62/900,040, filed Sep. 13, 2019, entitled “FUSOSOME COMPOSITIONS FOR HEMATOPOIETIC STEM CELL DELIVERY”, the contents of which are incorporated by reference in their entirety for all purposes.

### INCORPORATION BY REFERENCE OF SEQUENCE LISTING

[0002] The present application is being filed along with a Sequence Listing in electronic format. The Sequence Listing is provided as a file entitled 186152003140SeqList.TXT, created Nov. 14, 2019, which is 970 kilobytes in size. The information in the electronic format of the Sequence Listing is incorporated by reference in its entirety.

### BACKGROUND

[0003] Complex biologics are promising therapeutic candidates for a variety of diseases. However, it is difficult to deliver large biologic agents into a cell because the plasma membrane acts as a barrier between the cell and the extracellular space. There is a need in the art for new methods of delivering complex biologics into cells in a subject.

### SUMMARY

[0004] The present disclosure provides, at least in part, fusosome methods and compositions for in vivo delivery. In some embodiments, the fusosome comprises a combination of elements that promote specificity for target cells, e.g., one or more of a fusogen, a positive target cell-specific regulatory element, and a non-target cell-specific regulatory element. In some embodiments, the fusosome comprises one or more modifications that decrease an immune response against the fusosome.

### Enumerated embodiments

[0005] 1. A fusosome comprising:
[0006] a) a lipid bilayer comprising a fusogen; and
[0007] b) a nucleic acid that comprises:
   [0008] (i) a payload gene encoding an exogenous agent, e.g. a payload gene encoding an exogenous agent of Table 5 or Table 6, optionally wherein the exogenous agent is set forth in any one of SEQ ID NOS: 151-208, a functional fragment thereof, or a functional variant thereof comprising an amino acid sequence having at least 70%, 75%, 80%, 85%, 90%, 95%, 96%, 97%, 98%, or 99%, identity to an amino acid sequence set forth in any one of SEQ ID NOS: 151-208; and
   [0009] (ii) a positive hematopoietic stem cell (HSC)-specific regulatory element (e.g., a HSC-specific promoter) operatively linked to the payload gene, wherein the positive HSC-specific regulatory element increases expression of the payload gene in a HSC relative to an otherwise similar fusosome lacking the positive HSC-specific regulatory element.

[0010] 2. The fusosome of embodiment 1, wherein the nucleic acid further comprises a non-target cell-specific regulatory element (NTCSRE) that is a non-HSC-specific regulatory element (e.g., a non-HSC-specific miRNA recognition sequence), operatively linked to the payload gene, wherein the non-HSC-specific regulatory element decreases expression of the payload gene in a non-HSC relative to an otherwise similar fusosome lacking the non-HSC-specific regulatory element.

[0011] 3. A fusosome comprising:
[0012] a) a lipid bilayer comprising a fusogen; and
[0013] b) a nucleic acid that comprises:
   [0014] (i) a payload gene encoding an exogenous agent, e.g., an exogenous agent of Table 5 or Table 6, optionally wherein the exogenous agent is set forth in any one of SEQ ID NOS: 151-208, a functional fragment thereof, or a functional variant thereof comprising an amino acid sequence having at least 70%, 75%, 80%, 85%, 90%, 95%, 96%, 97%, 98%, or 99%, identity to an amino acid sequence set forth in any one of SEQ ID NOS: 151-208; and
   [0015] (ii) a promoter operatively linked to the payload gene, wherein the promoter is chosen from a vav regulatory element, CD34, CD59, CD90, CD49f, EMCN, or TIE2 promoter, e.g., according to a sequence of a promoter in Table 3, or a sequence having at least 70%, 75%, 80%, 85%, 90%, 95%, 96%, 97%, 98%, or 99% identity thereto.

[0016] 4. A fusosome comprising:
[0017] a) a lipid bilayer comprising a fusogen; and
[0018] b) a nucleic acid that comprises:
   [0019] (i) a payload gene encoding an exogenous agent, e.g. a payload gene encoding an exogenous agent of Table 5 or Table 6, optionally wherein the exogenous agent is set forth in any one of SEQ ID NOS: 151-208, a functional fragment thereof, or a functional variant thereof comprising an amino acid sequence having at least 70%, 75%, 80%, 85%, 90%, 95%, 96%, 97%, 98%, or 99%, identity to an amino acid sequence set forth in any one of SEQ ID NOS: 151-208; and
   [0020] (ii) a non-target cell-specific regulatory element (NTCSRE) (e.g., a non-target cell-specific miRNA recognition sequence) that is a non-HSC-specific regulatory element, operatively linked to the payload gene, wherein the NTCSRE decreases expression of the payload gene in a non-target cell or tissue relative to an otherwise similar fusosome lacking the NTCSRE.

[0021] 5. A fusosome comprising:
[0022] a) a lipid bilayer comprising a fusogen; and
[0023] b) a nucleic acid that comprises:
   [0024] (i) a payload gene encoding an exogenous agent, e.g. a payload gene encoding an exogenous agent of Table 5 or Table 6, optionally wherein the exogenous agent is set forth in any one of SEQ ID NOS: 151-208, a functional fragment thereof, or a functional variant thereof comprising an amino acid sequence having at least 70%, 75%, 80%, 85%, 90%, 95%, 96%, 97%, 98%, or 99%, identity to an amino acid sequence set forth in any one of SEQ ID NOS: 151-208; and
   [0025] (ii) a negative target cell-specific regulatory element (negative TCSRE) (e.g., a tissue-specific miRNA recognition sequence) that is a non-HSC-specific regulatory element, operatively linked to the payload gene, wherein the negative TCSRE decreases expression of the exogenous agent in a non-target cell or tissue relative to an otherwise similar nucleic acid lacking the negative TCSRE.

[0026] 6. The fusosome of either embodiment 4 or 5 wherein the nucleic acid further comprises a positive HSC-specific regulatory element (e.g., a HSC-specific promoter) operatively linked to the payload gene, wherein the positive HSC-specific regulatory element increases expression of the payload gene in a HSC relative to an otherwise similar fusosome lacking the positive HSC-specific regulatory element.

[0027] 7. A fusosome comprising:
[0028] a) a lipid bilayer comprising a fusogen;
[0029] b) a nucleic acid that comprises a payload gene encoding an exogenous agent, e.g. a payload gene encoding an exogenous agent of Table 5 or Table 6, optionally wherein the exogenous agent is set forth in any one of SEQ ID NOS: 151-208, a functional fragment thereof, or a functional variant thereof comprising an amino acid sequence having at least 70%, 75%, 80%, 85%, 90%, 95%, 96%, 97%, 98%, or 99%, identity to an amino acid sequence set forth in any one of SEQ ID NOS: 151-208; and
[0030] c) one or both of:
   [0031] (i) a first exogenous or overexpressed immunosuppressive protein on the lipid bilayer; or
   [0032] (ii) a first immunostimulatory protein that is absent or present at reduced levels (e.g., reduced by at least 10%, 20%, 30%, 40%, 50%, 60%, 70%, 80%, or 90%) compared to a fusosome generated from an otherwise similar, unmodified source cell.

[0033] 8. The fusosome of any of the preceding embodiments, wherein one or more of:

[0034] i) the fusosome fuses at a higher rate with a target cell than with a non-target cell, e.g., by at least at least 1%, 2%, 3%, 4%, 5%, 10%, 20%, 30%, 40%, 50%, 60%, 70%, 80%, 90%, 2-fold, 3-fold, 4-fold, 5-fold, 10-fold, 20-fold, 50-fold, or 100-fold;

[0035] ii) the fusosome fuses at a higher rate with a target cell than with another fusosome, e.g., by at least 10%, 20%, 30%, 40%, 50%, 60%, 70%, 80%, or 90%, 2-fold, 3-fold, 4-fold, 5-fold, 10-fold, 20-fold, 50-fold, or 100-fold;

[0036] iii) the fusosome fuses with target cells at a rate such that an agent in the fusosome is delivered to at least 10%, 20%, 30%, 40%, 50%, 60%, 70%, 80%, or 90%, of target cells after 24, 48, or 72 hours;

[0037] iv) the fusosome delivers the nucleic acid, e.g., retroviral nucleic acid, to a target cell at a higher rate than to a non-target cell, e.g., by at least at least 1%, 2%, 3%, 4%, 5%, 10%, 20%, 30%, 40%, 50%, 60%, 70%, 80%, 90%, 2-fold, 3-fold, 4-fold, 5-fold, 10-fold, 20-fold, 50-fold, or 100-fold;

[0038] v) the fusosome delivers the nucleic acid, e.g., retroviral nucleic acid, to a target cell at a higher rate than to another fusosome, e.g., by at least 10%, 20%, 30%, 40%, 50%, 60%, 70%, 80%, or 90%, 2-fold, 3-fold, 4-fold, 5-fold, 10-fold, 20-fold, 50-fold, or 100-fold; or

[0039] vi) the fusosome delivers the nucleic acid, e.g., retroviral nucleic acid, to a target cell at a rate such that an agent in the fusosome is delivered to at least 10%, 20%, 30%, 40%, 50%, 60%, 70%, 80%, or 90%, of target cells after 24, 48, or 72 hours.

[0040] 9. The fusosome of any of the preceding embodiments, wherein one or more of (e.g., 2 or all 3 of) the following apply: the fusosome is a retroviral vector, the lipid bilayer is comprised by an envelope, e.g., a viral envelope, and the nucleic acid is a retroviral nucleic acid.

[0041] 10. The fusosome of any of the preceding embodiments, wherein the nucleic acid comprises one or more of (e.g., all of) the following nucleic acid sequences: 5′ LTR (e.g., comprising U5 and lacking a functional U3 domain), Psi packaging element (Psi), Central polypurine tract (cPPT) Promoter operatively linked to the payload gene, payload gene (optionally comprising an intron before the open reading frame), Poly A tail sequence, WPRE, and 3′ LTR (e.g., comprising U5 and lacking a functional U3).

[0042] 11. The fusosome of any of the preceding embodiments, which comprises one or more of (e.g., all of) a polymerase (e.g., a reverse transcriptase, e.g., pol or a portion thereof), an integrase (e.g., pol or a portion thereof, e.g., a functional or non-functional variant), a matrix protein (e.g., gag or a portion thereof), a capsid protein (e.g., gag or a portion thereof), a nucleocaspid protein (e.g., gag or a portion thereof), and a protease (e.g., pro).

[0043] 12. The fusosome of embodiment 7, which comprises (i) and (ii).

[0044] 13. The fusosome of any of embodiments 7-12, which further comprises a second exogenous or overexpressed immunosuppressive protein on the lipid bilayer.

[0045] 14. The fusosome of any of embodiments 7-13, which further comprises a second immunostimulatory protein that is absent or present at reduced levels (e.g., reduced by at least 10%, 20%, 30%, 40%, 50%, 60%, 70%, 80%, or 90%) compared to a fusosome generated from an otherwise similar, unmodified source cell.

[0046] 15. The fusosome of any of embodiments 7-14, wherein the nucleic acid, e.g., retroviral vector, further comprises a positive HSC-specific regulatory element (e.g., a HSC-specific promoter) operatively linked to the payload gene, wherein the positive HSC-specific regulatory element increases expression of the payload gene in a HSC relative to an otherwise similar fusosome lacking the positive HSC-specific regulatory element.

[0047] 16. The fusosome of any of embodiments 7-15, wherein the nucleic acid, e.g., retroviral nucleic acid, further comprises a non-target cell-specific regulatory element (NTCSRE) (e.g., a non-target cell-specific miRNA recognition sequence), operatively linked to the payload gene, wherein the NTCSRE decreases expression of the payload gene in a non-target cell or tissue relative to an otherwise similar fusosome lacking the NTCSRE.

[0048] 17. The fusosome of any of embodiments 7-15, wherein the nucleic acid, e.g., retroviral nucleic acid, further comprises a negative target cell-specific regulatory element (negative TCSRE) (e.g., a tissue-specific miRNA recognition sequence), operatively linked to the payload gene, wherein the negative TCSRE decreases expression of the exogenous agent in a non-target cell or tissue relative to an otherwise similar nucleic acid, e.g., retroviral nucleic acid, lacking the negative TCSRE.

[0049] 18. The fusosome of any of embodiments 7-17, wherein, when administered to a subject (e.g., a human subject or a mouse), one or more of:

[0050] i) the fusosome does not produce a detectable antibody response (e.g., after a single administration or a plurality of administrations), or antibodies against the fusosome are present at a level of less than 10%, 5%, 4%, 3%, 2%, or 1% above a background level, e.g., by a FACS antibody detection assay, e.g., an assay of Example 13 or Example 14);

[0051] ii) the fusosome does not produce a detectable cellular immune response (e.g., T cell response, NK cell response, or macrophage response), or a cellular immune response against the fusosome is present at a level of less than 10%, 5%, 4%, 3%, 2%, or 1% above a background level, e.g., by a PBMC lysis assay (e.g., an assay of Example 5), by an NK cell lysis assay (e.g., an assay of Example 6), by a CD8 killer T cell lysis assay (e.g., an assay of Example 7), or by a macrophage phagocytosis assay (e.g., an assay of Example 8);

[0052] iii) the fusosome does not produce a detectable innate immune response, e.g., complement activation (e.g., after a single administration or a plurality of administrations), or the innate immune response against the fusosome is present at a level of less than 10%, 5%, 4%, 3%, 2%, or 1% above a background level, e.g., by a complement activity assay (e.g., an assay of Example 9);

[0053] iv) less than 10%, 5%, 4%, 3%, 2%, or 1% of fusosomes are inactivated by serum, e.g., by a serum inactivation assay, e.g., an assay of Example 11 or Example 12;

[0054] v) a target cell that has received the exogenous agent from the fusosome does not produce a detectable antibody response (e.g., after a single administration or a plurality of administrations), or antibodies against the target cell are present at a level of less than 10%, 5%, 4%, 3%, 2%, or 1% above a background level, e.g., by a FACS antibody detection assay, e.g., an assay of Example 15; or

[0055] vi) a target cell that has received the exogenous agent from the fusosome does not produce a detectable cellular immune response (e.g., T cell response, NK cell response, or macrophage response), or a cellular response against the target cell is present at a level of less than 10%, 5%, 4%, 3%, 2%, or 1% above a background level, e.g., by a macrophage phagocytosis assay (e.g., an assay of Example 16), by a PBMC lysis assay (e.g., an assay of Example 17), by an NK cell lysis assay (e.g., an assay of Example 18), or by a CD8 killer T cell lysis assay (e.g., an assay of Example 19).

[0056] 19. The fusosome of embodiment 18, wherein the background level is the corresponding level in the same subject prior to administration of the fusosome.

[0057] 20. The fusosome of any of embodiments 7-19, wherein the immunosuppressive protein (e.g., first immunosuppressive protein or second immunosuppressive protein) is a complement regulatory protein or CD47.

[0058] 21. The fusosome of any of embodiments 7-20, wherein the immunostimulatory protein (e.g., first immunostimulatory protein or second immunostimulatory protein) is an MHC I (e.g., HLA-A, HLA-B, HLA-C, HLA-E, or HLA-G) or MHC II (e.g., HLA-DP, HLA-DM, HLA-DOA, HLA-DOB, HLA-DQ, or HLA-DR) protein.

[0059] 22. The fusosome of any of the preceding embodiments, wherein the exogenous agent is chosen from: ADA, IL2RG, JAK3, IL7R, HBB, F8, F9, WAS, CYBA, CYBB, NCF1, NCF2, NCF4, UROS, TCIRG1, CLCN7, MPL, ITGA2B, ITGB3, ITGB2, PKLR, SLC25A38, RAG1, RAG2, FANCA, FANCC, FANCG, or ABCD1; or the exogenous agent is chosen from: MAN2B1, AGA, LYST, CTNS, LAMP2, GLA, CTSA, GBA, GAA, IDS, IDUA, ISSD, ARSB, GALNS, GLB1, NEU1, GNPTA, SUMF1, SMPD1, NPC1, NPC2, CTSK, GNS, HGSNAT, NAGLU, SGSH, NAGA, GUSB, PSAP, or LAL.

[0060] 23. The fusosome of any of the preceding embodiments, wherein the fusogen comprises VSV-G.

[0061] 24. The fusosome of any embodiments 1, 2, 6, 15, 22, or 23, wherein the positive HSC-specific regulatory element comprises a HSC-specific promoter, a HSC-specific enhancer, a HSC-specific splice site, a HSC-specific site extending half-life of an RNA or protein, a HSC-specific mRNA nuclear export promoting site, a HSC-specific translational enhancing site, or a HSC-specific post-translational modification site.

[0062] 25. The fusosome of any embodiments 1, 2, 6, 15, or 22-24, wherein the positive HSC-specific regulatory element comprises a HSC-specific promoter.

[0063] 26. The fusosome of embodiment 25, wherein the HSC-specific promoter comprises a motif of Table 3.

[0064] 27. The fusosome of embodiment 25 or 26, wherein the positive HSC-specific regulatory element comprises a promoter chosen from a vav regulatory element, CD34, CD59, CD90, CD49f, EMCN, or TIE2 promoter.

[0065] 28. The fusosome of any of embodiments 4-6, or 16-21, wherein the negative TCSRE or NTCSRE comprises a non-target cell-specific miRNA recognition sequence, non-target cell-specific protease recognition site, non-target cell-specific ubiquitin ligase site, non-target cell-specific transcriptional repression site, or non-target cell-specific epigenetic repression site.

[0066] 29. The fusosome of any of embodiments 4-6, 16-21, or 28, wherein the negative TCSRE or NTCSRE comprises a tissue-specific miRNA recognition sequence, tissue-specific protease recognition site, tissue-specific ubiquitin ligase site, tissue-specific transcriptional repression site, or tissue-specific epigenetic repression site.

[0067] 30. The fusosome of any of embodiments 4-6, 16-21, 28, or 29, wherein the negative TCSRE or NTCSRE comprises a non-HSC-specific miRNA recognition sequence, non-HSC-specific protease recognition site, non-HSC-specific ubiquitin ligase site, non-HSC-specific transcriptional repression site, or non-HSC-specific epigenetic repression site.

[0068] 31. The fusosome of any of embodiments 4-6, 16-21, or 28-30, wherein the negative TCSRE or NTCSRE comprises a non-HSC-specific miRNA recognition sequence bound by a miRNA of Table 4, e.g., by one or more of (e.g., two or more of) miR-126, miR-223, miR-181a, miR-181a-2, miR-155, or miR-150.

[0069] 32. The fusosome of any of embodiments 28-31, wherein the negative TCSRE or NTCSRE is situated or encoded within a transcribed region (e.g., the transcribed region encoding the exogenous agent), e.g., such that an RNA produced by the transcribed region comprises the miRNA recognition sequence within a UTR or coding region.

[0070] 33. The fusosome of any of the preceding embodiments, wherein the nucleic acid, e.g., retroviral nucleic acid, comprises one or more insulator elements.

[0071] 34. The fusosome of embodiment 33, wherein the nucleic acid, e.g., retroviral nucleic acid, comprises two insulator elements, e.g., a first insulator element upstream of the payload gene and a second insulator element downstream of the payload gene, e.g., wherein the first insulator element and second insulator element comprise the same or different sequences.

[0072] 35. The fusosome of any of the preceding embodiments, which is not genotoxic or does not increase the rate of tumor formation in target cells.

[0073] 36. The fusosome of any of the preceding embodiments, wherein the nucleic acid, e.g., retroviral nucleic acid, is capable of integrating into the genome of a target cell.

[0074] 37. The fusosome of embodiment 36, wherein the nucleic acid, e.g., retroviral nucleic acid, is an integration-competent lentivirus or an integration-deficient lentivirus.

[0075] 38. The fusosome of any of the preceding embodiments, wherein the target cell is chosen from a HSC, a myeloid-lymphoid balanced HSC, a myeloid-biased HSC, a lymphoid-biased HSC, a platelet-biased HSC, a platelet-myeloid-biased HSC, a long-term repopulating HSC, an intermediate-term repopulating HSC, or a short-term repopulating HSC.

[0076] 39. The fusosome of any of embodiments 4-6 and 9-38, wherein one or more of:

[0077] i) less than 10%, 5%, 4%, 3%, 2%, or 1% of the exogenous agent detectably present in the subject is in non-target cells;

[0078] ii) at least 90%, 95%, 96%, 97%, 98%, or 99% of the cells of the subject that detectably comprise the exogenous agent, are target cells (e.g., cells of a single cell type);

[0079] iii) less than 1,000,000, 500,000, 200,000, 100,000, 50,000, 20,000, or 10,000 cells of the cells of the subject that detectably comprise the exogenous agent are non-target cells;

[0080] iv) average levels of the exogenous agent in all target cells in the subject are at least 100-fold, 200-fold, 500-fold, or 1,000-fold higher than average levels of the exogenous agent in all non-target cells in the subject; or

[0081] v) the exogenous agent is not detectable in any non-target cell in the subject.

[0082] 40. The fusosome of any of the preceding embodiments, wherein the nucleic acid, e.g., retroviral nucleic acid, encodes a positive TCSRE and/or a NTCSRE or negative TCSRE.

[0083] 41. The fusosome of any of the preceding embodiments, wherein the nucleic acid, e.g., retroviral nucleic acid, comprises the complement of a positive TCSRE and/or a NTCSRE or negative TCSRE.

[0084] 42. The fusosome of either embodiment 40 or 41, wherein the positive TCSRE comprises a HSC-specific promoter that is at least 10%, 25%, 50%, 75%, 100%, 150%, 200%, 250%, 300%, 400%, 500%, 750%, 1000% or more active in a HSC than a non-HSC.

[0085] 43. The fusosome of any of embodiments 40-42, wherein the negative TCSRE or NTCSRE comprises a miRNA recognition sequence that decreases gene expression by at least 10%, 25%, 50%, 75%, or 100% in a non-HSC compared to a HSC.

[0086] 44. The fusosome of any of the preceding embodiments, which does not deliver nucleic acid, e.g., retroviral nucleic acid, to a non-target cell, e.g., an antigen presenting cell, an MHC class II+ cell, a professional antigen presenting cell, an atypical antigen presenting cell, a macrophage, a dendritic cell, a myeloid dendritic cell, a plasmacytoid dendritic cell, a CD11c+ cell, a CD11b+ cell, a splenocyte, a B cell, a hepatocyte, a endothelial cell, or a non-cancerous cell.

[0087] 45. The fusosome of any of the preceding embodiments, wherein less than 10%, 5%, 2.5%, 1%, 0.5%, 0.1%, 0.01%, 0.001%, 0.0001%, 0.00001%, or 0.000001% of a non-target cell type (e.g., one or more of an antigen presenting cell, an MHC class II+ cell, a professional antigen presenting cell, an atypical antigen presenting cell, a macrophage, a dendritic cell, a myeloid dendritic cell, a plasmacyteoid dendritic cell, a CD11c+ cell, a CD11b+ cell, a splenocyte, a B cell, a hepatocyte, a endothelial cell, or a non-cancerous cell) comprise the nucleic acid, e.g., retroviral nucleic acid, e.g., using quantitative PCR, e.g., using an assay of Example 1.

[0088] 46. The fusosome of any of the preceding embodiments, wherein the target cells comprise 0.00001-10, 0.0001-10, 0.001-10, 0.01-10, 0.1-10, 0.5-5, 1-4, 1-3, or 1-2 copies of the nucleic acid, e.g., retroviral nucleic acid, or a portion thereof, per host cell genome, e.g., wherein copy number of the nucleic acid, e.g., retroviral nucleic acid, is assessed after administration in vivo.

[0089] 47. The fusosome of any of the preceding embodiments, wherein:

[0090] less than 10%, 5%, 2.5%, 1%, 0.5%, 0.1%, 0.01% of the non-target cells (e.g., an antigen presenting cell, an MHC class II+ cell, a professional antigen presenting cell, an atypical antigen presenting cell, a macrophage, a dendritic cell, a myeloid dendritic cell, a plasmacyteoid dendritic cell, a CD11c+ cell, a CD11b+ cell, a splenocyte, a B cell, a hepatocyte, a endothelial cell, or a non-cancerous cell) comprise the exogenous agent; or

[0091] the exogenous agent (e.g., protein) is not detectably present in a non-target cell, e.g an antigen presenting cell, an MHC class II+ cell, a professional antigen presenting cell, an atypical antigen presenting cell, a macrophage, a dendritic cell, a myeloid dendritic cell, a plasmacyteoid dendritic cell, a CD11c+ cell, a CD11b+ cell, a splenocyte, a B cell, a hepatocyte, a endothelial cell, or a non-cancerous cell.

[0092] 48. The fusosome of any of the preceding embodiments, wherein the fusosome delivers the nucleic acid, e.g., retroviral nucleic, acid to a target cell, e.g., a HSC, a myeloid-lymphoid balanced HSC, a myeloid-biased HSC, a lymphoid-biased HSC, a platelet-biased HSC, a platelet-myeloid-biased HSC, a long-term repopulating HSC, an intermediate-term repopulating HSC, or a short-term repopulating HSC.

[0093] 49. The fusosome of any of the preceding embodiments, wherein at least 0.00001%, 0.0001%, 0.001%, 0.001%, 0.01%, 0.1%, 1%, 2%, 5%, 10%, 20%, 30%, 40%, 50%, 60%, 70%, 80%, or 90% of target cells (e.g., one or more of a HSC, a myeloid-lymphoid balanced HSC, a myeloid-biased HSC, a lymphoid-biased HSC, a platelet-biased HSC, a platelet-myeloid-biased HSC, a long-term repopulating HSC, an intermediate-term repopulating HSC, or a short-term repopulating HSC) comprise the nucleic acid, e.g., retroviral nucleic acid, e.g., using quantitative PCR, e.g., using an assay of Example 3.

[0094] 50. The fusosome of any of the preceding embodiments, wherein at least 0.00001%, 0.0001%, 0.001%, 0.001%, 0.01%, 0.1%, 1%, 2%, 5%, 10%, 20%, 30%, 40%, 50%, 60%, 70%, 80%, or 90% of target cells (e.g., a HSC, a myeloid-lymphoid balanced HSC, a myeloid-biased HSC, a lymphoid-biased HSC, a platelet-biased HSC, a platelet-myeloid-biased HSC, a long-term repopulating HSC, an intermediate-term repopulating HSC, or a short-term repopulating HSC) comprise the exogenous agent.

[0095] 51. The fusosome of any of the preceding embodiments, wherein, upon administration, the ratio of target cells comprising the nucleic acid, e.g., retroviral nucleic acid, to non-target cells comprising the nucleic acid, e.g., retroviral nucleic acid, is at least 1.5, 2, 3, 4, 5, 10, 25, 50, 100, 500, 1000, 5000, 10,000, e.g., according to a quantitative PCR assay, e.g., using assays of Example 1 and Example 3.

[0096] 52. The fusosome of any of the preceding embodiments, wherein the ratio of the average copy number of nucleic acid, e.g., retroviral nucleic acid, or a portion thereof in target cells to the average copy number of nucleic acid, e.g., retroviral nucleic acid, or a portion thereof in non-target cells is at least 1.5, 2, 3, 4, 5, 10, 25, 50, 100, 500, 1000, 5000, 10,000, e.g., according to a quantitative PCR assay, e.g., using assays of Example 1 and Example 3.

[0097] 53. The fusosome of any of the preceding embodiments, wherein the ratio of the median copy number of of nucleic acid, e.g., retroviral nucleic acid, or a portion thereof in target cells to the median copy number of nucleic acid, e.g., retroviral nucleic acid, or a portion thereof in non-target cells is at least 1.5, 2, 3, 4, 5, 10, 25, 50, 100, 500, 1000, 5000, 10,000, e.g., according to a quantitative PCR assay, e.g., using assays of Example 1 and Example 3.

[0098] 54. The fusosome of any of the preceding embodiments, wherein the ratio of target cells comprising the exogenous RNA agent to non-target cells comprising the exogenous RNA agent is at least 1.5, 2, 3, 4, 5, 10, 25, 50, 100, 500, 1000, 5000, 10,000, e.g., according to a reverse transcription quantitative PCR assay.

[0099] 55. The fusosome of any of the preceding embodiments, wherein the ratio of the average exogenous RNA agent level of target cells to the average exogenous RNA agent level of non-target cells is at least 1.5, 2, 3, 4, 5, 10, 25, 50, 100, 500, 1000, 5000, 10,000, e.g., according to a reverse transcription quantitative PCR assay.

[0100] 56. The fusosome of any of the preceding embodiments, wherein the ratio of the median exogenous RNA agent level of target cells to the median exogenous RNA agent level of non-target cells is at least 1.5, 2, 3, 4, 5, 10, 25, 50, 100, 500, 1000, 5000, 10,000, e.g., according to a reverse transcription quantitative PCR assay.

[0101] 57. The fusosome of any of the preceding embodiments, wherein the ratio of target cells comprising the exogenous protein agent to non-target cells comprising the exogenous protein agent is at least 1.5, 2, 3, 4, 5, 10, 25, 50, 100, 500, 1000, 5000, 10,000, e.g., according to a FACS assay, e.g., using assays of Example 2 and Example 4.

[0102] 58. The fusosome of any of the preceding embodiments, wherein the ratio of the average exogenous protein agent level of target cells to the average exogenous protein agent level of non-target cells is at least 1.5, 2, 3, 4, 5, 10, 25, 50, 100, 500, 1000, 5000, 10,000, e.g., according to a FACS assay, e.g., using assays of Example 2 and Example 4.

[0103] 59. The fusosome of any of the preceding embodiments, wherein the ratio of the median exogenous protein agent level of target cells to the median exogenous protein agent level of non-target cells is at least 1.5, 2, 3, 4, 5, 10, 25, 50, 100, 500, 1000, 5000, 10,000, e.g., according to a FACS assay, e.g., using assays of Example 2 and Example 4.

[0104] 60. The fusosome of any of the preceding embodiments, which comprises one or both of:
[0105] i) an exogenous or overexpressed immunosuppressive protein on the lipid bilayer, e.g., envelope; and
[0106] ii) an immunostimulatory protein that is absent or present at reduced levels (e.g., reduced by at least 10%, 20%, 30%, 40%, 50%, 60%, 70%, 80%, or 90%) compared to a fusosome generated from an otherwise similar, unmodified source cell.

[0107] 61. The fusosome of any of the preceding embodiments, which comprises one or more of:
[0108] i) a first exogenous or overexpressed immunosuppressive protein on the lipid bilayer, e.g., envelope, and a second exogenous or overexpressed immunosuppressive protein on the lipid bilayer, e.g., envelope;
[0109] ii) a first exogenous or overexpressed immunosuppressive protein on the lipid bilayer, e.g., envelope, and a second immunostimulatory protein that is absent or present at reduced levels (e.g., reduced by at least 10%, 20%, 30%, 40%, 50%, 60%, 70%, 80%, or 90%) compared to a fusosome generated from an otherwise similar, unmodified source cell; or
[0110] iii) a first immunostimulatory protein that is absent or present at reduced levels (e.g., reduced by at least 10%, 20%, 30%, 40%, 50%, 60%, 70%, 80%, or 90%) compared to a fusosome generated from an otherwise similar, unmodified source cell and a second immunostimulatory protein that is absent or present at reduced levels (e.g., reduced by at least 10%, 20%, 30%, 40%, 50%, 60%, 70%, 80%, or 90%) compared to a fusosome generated from an otherwise similar, unmodified source cell.

[0111] 62. The fusosome of any of the preceding embodiments, wherein the fusosome is in circulation at least 0.5, 1, 2, 3, 4, 6, 12, 18, 24, 36, or 48 hours after administration to the subject.

[0112] 63. The fusosome of any of the preceding embodiments, wherein at least 0.001%, 0.01%, 0.1%, 1%, 10%, 20%, 30%, 40%, 50%, 60%, 70%, 80%, 90%, or 100% of fusosomes are in circulation 30 minutes after administration.

[0113] 64. The fusosome of any of the preceding embodiments, wherein at least 0.001%, 0.01%, 0.1%, 1%, 10%, 20%, 30%, 40%, 50%, 60%, 70%, 80%, 90%, or 100% of fusosomes are in circulation 1 hour after administration.

[0114] 65. The fusosome of any of the preceding embodiments, wherein at least 0.001%, 0.01%, 0.1%, 1%, 10%, 20%, 30%, 40%, 50%, 60%, 70%, 80%, 90%, or 100% of fusosomes are in circulation 2 hours after administration.

[0115] 66. The fusosome of any of the preceding embodiments, wherein at least 0.001%, 0.01%, 0.1%, 1%, 10%, 20%, 30%, 40%, 50%, 60%, 70%, 80%, 90%, or 100% of fusosomes are in circulation 4 hours after administration.

[0116] 67. The fusosome of any of the preceding embodiments, wherein at least 0.001%, 0.01%, 0.1%, 1%, 10%, 20%, 30%, 40%, 50%, 60%, 70%, 80%, 90%, or 100% of fusosomes are in circulation 8 hours after administration.

[0117] 68. The fusosome of any of the preceding embodiments, wherein at least 0.001%, 0.01%, 0.1%, 1%, 10%, 20%, 30%, 40%, 50%, 60%, 70%, 80%, 90%, or 100% of fusosomes are in circulation 12 hours after administration.

[0118] 69. The fusosome of any of the preceding embodiments, wherein at least 0.001%, 0.01%, 0.1%, 1%, 10%, 20%, 30%, 40%, 50%, 60%, 70%, 80%, 90%, or 100% of fusosomes are in circulation 18 hours after administration.

[0119] 70. The fusosome of any of the preceding embodiments, wherein at least 0.001%, 0.01%, 0.1%, 1%, 10%, 20%, 30%, 40%, 50%, 60%, 70%, 80%, 90%, or 100% of fusosomes are in circulation 24 hours after administration.

[0120] 71. The fusosome of any of the preceding embodiments, wherein at least 0.001%, 0.01%, 0.1%, 1%, 10%, 20%, 30%, 40%, 50%, 60%, 70%, 80%, 90%, or 100% of fusosomes are in circulation 36 hours after administration.

[0121] 72. The fusosome of any of the preceding embodiments, wherein at least 0.001%, 0.01%, 0.1%, 1%, 10%, 20%, 30%, 40%, 50%, 60%, 70%, 80%, 90%, or 100% of fusosomes are in circulation 48 hours after administration.

[0122] 73. The fusosome of any of the preceding embodiments, which has a reduction in immunogenicity as measured by a reduction in humoral response following one or more administration of the fusosome to an appropriate animal model, e.g., an animal model described herein, compared to reference fusosome, e.g., an unmodified fusosome otherwise similar to the fusosome.

[0123] 74. The fusosome of embodiment 73, wherein the reduction in humoral response is measured in a serum sample by an anti-cell antibody titre, e.g., anti-retroviral antibody titre, e.g., by ELISA.

[0124] 75. The fusosome of any of the preceding embodiments, wherein a serum sample from animals administered the fusosome has a reduction of 1%, 5%, 10%, 20%, 30%, 40%, 50%, 60%, 70%, 80%, 90%, or more of an anti-fusosome antibody titer compared to the serum sample from a subject administered an unmodified cell.

[0125] 76. The fusosome of any of the preceding embodiments, wherein a serum sample from a subject administered the fusosome has an increased anti-cell antibody titre, e.g., increased by 1%, 2%, 5%, 10%, 20%, 30%, or 40% from baseline, e.g., wherein baseline refers to serum sample from the same subject before administration of the fusosome.

[0126] 77. The fusosome of any of the preceding embodiments, wherein:

[0127] the subject to be administered the fusosome or a pharmaceutical composition comprising the fusosome has, or is known to have, or is tested for, a pre-existing antibody (e.g., IgG or IgM) reactive with the fusosome;

[0128] the subject to be administered the fusosome does not have detectable levels of a pre-existing antibody reactive with the fusosome;

[0129] a subject that has received the fusosome or a pharmaceutical composition comprising the fusosome has, or is known to have, or is tested for, an antibody (e.g., IgG or IgM) reactive with the fusosome;

[0130] the subject that received the fusosome or a pharmaceutical composition comprising the fusosome (e.g., at least once, twice, three times, four times, five times, or more) does not have detectable levels of antibody reactive with the fusosome; or

[0131] levels of antibody do not rise more than 1%, 2%, 5%, 10%, 20%, or 50% between two timepoints, the first timepoint being before the first administration of the fusosome, and the second timepoint being after one or more administrations of the fusosome.

[0132] 78. The fusosome of any of the preceding embodiments, wherein the fusosome is produced by the methods of Example 5, 6, or 7, e.g., from cells transfected with HLA-G or HLA-E cDNA.

[0133] 79. The fusosome of any of the preceding embodiments, wherein fusosomes generated from NMC-HLA-G cells have a decreased percentage of lysis, e.g., PBMC mediated lysis, NK cell mediated lysis, and/or CD8+ T cell mediated lysis, at specific timepoints as compared to fusosomes generated from NMCs or NMC-empty vector.

[0134] 80. The fusosome of any of the preceding embodiments, wherein the modified fusosome evades phagocytosis by macrophages.

[0135] 81. The fusosome of any of the preceding embodiments, wherein the fusosome is produced by the methods of Example 8, e.g., from cells transfected with CD47 cDNA.

[0136] 82. The fusosome of any of the preceding embodiments, wherein the phagocytic index is reduced when macrophages are incubated with fusosomes derived from NMC-CD47, versus those derived from NMC, or NMC-empty vector.

[0137] 83. The fusosome of any of the preceding embodiments, which has a reduction in macrophage phagocytosis, e.g., a reduction of 1%, 5%, 10%, 20%, 30%, 40%, 50%, 60%, 70%, 80%, 90%, or more in macrophage phagocytosis compared to a reference fusosome, e.g., an unmodified fusosome otherwise similar to the fusosome, wherein the reduction in macrophage phagocytosis is determined by assaying the phagocytosis index in vitro, e.g., as described in Example 8.

[0138] 84. The fusosome of any of the preceding embodiments, wherein the fusosome composition has a phagocytosis index of 0, 1, 10, 100, or more, e.g., as measured by an assay of Example 8, when incubated with macrophages in an in vitro assay of macrophage phagocytosis.

[0139] 85. The fusosome of any of the preceding embodiments, which is modified and has reduced complement activity compared to an unmodified fusosome.

[0140] 86. The fusosome of any of the preceding embodiments, which is produced by the methods of Example 9, e.g., from cells transfected with a cDNA coding for a complement regulatory protein, e.g., DAF.

[0141] 87. The fusosome of any of the preceding embodiments, wherein the dose of fusosome at which 200 pg/ml of C3a is present is greater for the modified fusosome (e.g., HEK293-DAF) incubated with corresponding mouse sera (e.g., HEK-293 DAF mouse sera) than for the reference fusosome (e.g., HEK293 retroviral vector) incubated with corresponding mouse sera (e.g., HEK293 mouse sera).

[0142] 88. The fusosome of any of the preceding embodiments, wherein the dose of fusosome at which 200 pg/ml of C3a is present is greater for for the modified fusosome (e.g., HEK293-DAF) incubated with naive mouse sera than for the reference fusosome (e.g., HEK293 retroviral vector) incubated with naive mouse sera.

[0143] 89. The fusosome of any of the preceding embodiments, wherein the fusosome is resistant to complement mediated inactivation in patient serum 30 minutes after administration according to an assay of Example 9.

[0144] 90. The fusosome of any of the preceding embodiments, wherein at least 0.001%, 0.01%, 0.1%, 1%, 10%, 20%, 30%, 40%, 50%, 60%, 70%, 80%, 90%, or 100% of fusosomes are resistant to complement mediated inactivation.

[0145] 91. The fusosome of any of embodiments 86-90, wherein the complement regulatory protein comprises one or more of proteins that bind decay-accelerating factor (DAF, CD55), e.g. factor H (FH)-like protein-1 (FHL-1), e.g. C4b-binding protein (C4BP), e.g. complement receptor 1 (CD35), e.g. Membrane cofactor protein (MCP, CD46), eg. Protectin (CD59), e.g. proteins that inhibit the classical and alternative complement pathway CD/C5 convertase enzymes, e.g. proteins that regulate MAC assembly.

[0146] 92. The fusosome of any of the preceding embodiments, which is produced by the methods of Example 10, e.g., from cells transfected with a DNA coding for an shRNA targeting MHC class I, e.g., wherein retroviral vectors derived from NMC-shMHC class I has lower expression of MHC class I compared to NMCs and NMC-vector control.

[0147] 93. The fusosome of any of the preceding embodiments, wherein a measure of immunogenicity for fusosomes is serum inactivation, e.g., serum inactivation measured as described herein, e.g., as described in Example 11.

[0148] 94. The fusosome of any of the preceding embodiments, wherein the percent of cells which receive the exogenous agent is not different between fusosome samples that have been incubated with serum and heat-inactivated serum from fusosome naïve mice.

[0149] 95. The fusosome of any of the preceding embodiments, wherein the percent of cells which receive the exogenous agent is not different between fusosome samples that have been incubated with serum from fusosome naïve mice and no-serum control incubations.

[0150] 96. fusosome of any of the preceding embodiments, wherein the percent of cells which receive the exogenous agent is less in fusosome samples that have been incubated with positive control serum than in fusosome samples that have been incubated with serum from fusosome naïve mice.

[0151] 97. The fusosome of any of the preceding embodiments, wherein a modified fusosome, e.g., modified by a method described herein, has a reduced (e.g., reduced compared to administration of an unmodified fusosome) serum inactivation following multiple (e.g., more than one, e.g., 2 or more), administrations of the modified fusosome.

[0152] 98. The fusosome of any of the preceding embodiments, wherein a fusosome described herein is not inactivated by serum following multiple administrations.

[0153] 99. The fusosome of any of the preceding embodiments, wherein a measure of immunogenicity for the fusosome is serum inactivation, e.g., after multiple administrations, e.g., serum inactivation after multiple administrations measured as described herein, e.g., as described in Example 12.

[0154] 100. The fusosome of any of the preceding embodiments, wherein the percent of cells which receive the exogenous agent is not different between fusosome samples that have been incubated with serum and heat-inactivated serum from mice treated with modified (e.g., HEK293-HLA-G) fusosomes.

[0155] 101. The fusosome of any of the preceding embodiments, wherein the percent of cells which receive the exogenous agent is not different between fusosome samples that have been incubated from mice treated 1, 2, 3, 5 or 10 times with modified (e.g., HEK293-HLA-G) fusosomes.

[0156] 102. The fusosome of any of the preceding embodiments, wherein the percent of cells which receive the exogenous agent is not different between fusosome samples that have been incubated with serum from mice treated with vehicle and from mice treated with modified (e.g., HEK293-HLA-G) fusosomes.

[0157] 103. The fusosome of any of the preceding embodiments, wherein the percent of cells which receive the exogenous agent is less for fusosomes derived from a reference cell (e.g., HEK293) than for modified (e.g., HEK293-HLA-G) fusosomes.

[0158] 104. The fusosome of any of the preceding embodiments, wherein a measure of immunogenicity for a fusosome is antibody response.

[0159] 105. The fusosome of any of the preceding embodiments, wherein a subject that receives a fusosome described herein has pre-existing antibodies which bind to and recognize fusosome, e.g., measured as described herein, e.g., as described in Example 13.

[0160] 106. The fusosome of any of the preceding embodiments, wherein serum from fusosome-naïve mice shows more signal (e.g., fluorescence) than the negative control, e.g., serum from a mouse depleted of IgM and IgG, e.g., indicating that in immunogenicity has occurred.

[0161] 107. The fusosome of any of the preceding embodiments, wherein serum from fusosome-naïve mice shows similar signal (e.g., fluorescence) compared to the negative control, e.g., indicating that immunogenicity did not detectably occur.

[0162] 108. The fusosome of any of the preceding embodiments, which is a modified fusosome, e.g., modified by a method described herein, and which has a reduced (e.g., reduced compared to administration of an unmodified fusosome) humoral response following multiple (e.g., more than one, e.g., 2 or more), administrations of the modified fusosome, e.g., measured as described herein, e.g., as described in Example 14.

[0163] 109. The fusosome of any of the preceding embodiments, wherein the fusosome is produced by the methods of Example 5, 6, 7, or 14, e.g., from cells transfected with HLA-G or HLA-E cDNA.

[0164] 110. The fusosome of any of the preceding embodiments, wherein humoral response is assessed by determining a value for the level of anti-fusosome antibodies (e.g., IgM, IgG1, and/or IgG2 antibodies).

[0165] 111. The fusosome of any of the preceding embodiments, wherein modified (e.g., NMC-HLA-G) fusosomes have decreased anti-viral IgM or IgG1/2 antibody titers (e.g., as measured by fluorescence intensity on FACS) after injections, as compared to a control, e.g., NMC fusosomes or NMC-empty fusosomes.

[0166] 112. The fusosome of any of the preceding embodiments, wherein recipient cells are not targeted by an antibody response, or an antibody response will be below a reference level, e.g., measured as described herein, e.g., as described in Example 15.

[0167] 113. The fusosome of any of the preceding embodiments, signal (e.g., mean fluorescence intensity) is similar for recipient cells from mice treated with fusosomes and mice treated with PBS.

[0168] 114. The fusosome of any of the preceding embodiments, wherein a measure of the immunogenicity of recipient cells is the macrophage response.

[0169] 115. The fusosome of any of the preceding embodiments, wherein recipient cells are not targeted by macrophages, or are targeted below a reference level.

[0170] 116. The fusosome of any of the preceding embodiments, wherein the phagocytic index, e.g., measured as described herein, e.g., as described in Example 16, is similar for recipient cells derived from mice treated with fusosomes and mice treated with PBS.

[0171] 117. The fusosome of any of the preceding embodiments, wherein a measure of the immunogenicity of recipient cells is the PBMC response.

[0172] 118. The fusosome of any of the preceding embodiments, wherein recipient cells do not elicit a PBMC response.

[0173] 119. The fusosome of any of the preceding embodiments, wherein the percent of CD3+/CMG+ cells is similar for recipient cells derived from mice treated with fusosome and mice treated with PBS, e.g., as measured as described herein, e.g., as described in Example 17.

[0174] 120. The fusosome of any of the preceding embodiments, wherein a measure of the immunogenicity of recipient cells is the natural killer cell response.

[0175] 121. The fusosome of any of the preceding embodiments, wherein recipient cells do not elicit a natural killer cell response or elicit a lower natural killer cell response, e.g., lower than a reference value.

[0176] 122. The fusosome of any of the preceding embodiments, wherein the percent of CD3+/CMG+ cells is similar for recipient cells derived from mice treated with fusosome and mice treated with PBS, e.g., as measured as described herein, e.g., as described in Example 18.

[0177] 123. The fusosome of any of the preceding embodiments, wherein a measure of the immunogenicity of recipient cells is the CD8+ T cell response.

[0178] 124. The fusosome of any of the preceding embodiments, wherein recipient cells do not elicit a CD8+ T cell response or elicit a lower CD8+ T cell response, e.g., lower than a reference value.

[0179] 125. The fusosome of any of the preceding embodiments, wherein the percent of CD3+/CMG+ cells is similar for recipient cells derived from mice treated with fusosome and mice treated with PBS, e.g., as measured as described herein, e.g., as described in Example 19.

[0180] 126. The fusosome of any of the preceding embodiments, wherein the fusogen is a re-targeted fusogen.

[0181] 127. The fusosome of any of the preceding embodiments, which comprises a nucleic acid, e.g., retroviral nucleic acid, that encodes one or both of: (i) a positive target cell-specific regulatory element operatively linked to a nucleic acid encoding an exogenous agent, or (ii) a non-target cell-specific regulatory element or negative TCSRE operatively linked to the nucleic acid encoding the exogenous agent.

[0182] 128. A pharmaceutical composition comprising the fusosome of any of the preceding embodiments, and a pharmaceutically acceptable carrier, diluent, or excipient.

[0183] 129. A method of delivering an exogenous agent to a subject (e.g., a human subject) comprising administering to the subject a fusosome of any of embodiments 1-127 or pharmaceutical composition of embodiment 128, thereby delivering the exogenous agent to the subject.

[0184] 130. A method of modulating a function, in a subject (e.g., a human subject), target tissue or target cell (e.g., HSC), comprising contacting, e.g., administering to, the subject, the target tissue or the target cell a fusosome of any of embodiments 1-127 or the pharmaceutical composition of claim 128.

[0185] 131. The method of embodiment 130, wherein the target tissue or the target cell is present in a subject.

[0186] 132. A method of treating a genetic deficiency in a subject (e.g., a human subject) comprising administering to the subject a fusosome of any of embodiments 1-127 or the pharmaceutical composition of claim 128.

[0187] 133. The method of embodiment 131, wherein the genetic deficiency is a genetic deficiency of Table 5 or Table 6.

[0188] 134. The method of embodiment 132 or embodiment 133, wherein the genetic deficiency is a genetic deficiency able to be treated by the payload gene encoding the exogenous agent.

[0189] 135. The method of any of embodiments 132-134, wherein the genetic deficiency is selected from ADA SCID; X-linked SCID; Jak-3 SCID; IL7R SCID; Thalassemia Major, Sickle Cell Disease; Hemophilia A; Hemophilia B; Wiskott-Aldrich Syndrome; Chronic Granulomatous Disease; Gunther Disease; Malignant Infantile Osteoporosis; Congenital Amegakaryocytic Thrombocytopenia; Glanzmann's Thrombasthenia; Leukocyte Adhesion Deficiency; Pyruvate Kinase Deficiency; Autosomal Recessive Sideroblastic Anemia; Rag 1 Deficiency; Rag 2 Deficiency; Fanconi Anemia; X-Linked Adrenoleukodystrophy; Alpha-mannosidosis; Aspartylgucosaminuria; Chediak-Higashi Syndrome; Cystinosis; Danon Disease; Fabry Disease; Galactosialidosis; Gaucher Disease; Pompe Disease; Hunter Disease; Hurler Disease; or Infantile Free Sialic Acid Storage Disease; or Maroteaux-Lamy; Morquio Type A; Morquio Type B; Mucolipidosis Type I; Mucolipidosis Type II; Multiple Sulfatase Deficiency; Niemann-Pick Disease Type A; Niemann-Pick Disease Type B; Niemann-Pick Disease Type C; Pycnodystosis; Sanfilippo Syndrome Type A; Sanfilippo Syndrome Type B; Sanfilippo Syndrome Type C; Sanfilippo Syndrome Type D; Schindler Disease Types I and II; Sly Disease; Sphinoglipidosis-Encephalopathy; or Wolman Disease.

[0190] 136. A fusosome of any of embodiments 1-127 or pharmaceutical composition of embodiment 128 for use in treating a subject (e.g. a human subject) with a genetic deficiency.

[0191] 137. Use of a fusosome of any of embodiments 1-127 or pharmaceutical composition of embodiment 128 for manufacture of a medicament for use in treating a subject (e.g. a human subject) with a genetic deficiency.

[0192] 138. The fusosome or pharmaceutical composition for use of embodiment 137 or the use of embodiments 138, wherein the fusosome comprises a payload gene encoding an exogenous agent for treating the genetic deficiency.

[0193] 139. The fusosome or pharmaceutical composition for use of embodiment 136 or 138 or the use of embodiment 137 or 138, wherein the genetic deficiency is selected from ADA SCID; X-linked SCID; Jak-3 SCID; IL7R SCID; Thalassemia Major, Sickle Cell Disease; Hemophilia A; Hemophilia B; Wiskott-Aldrich Syndrome; Chronic Granulomatous Disease; Gunther Disease; Malignant Infantile Osteoporosis; Congenital Amegakaryocytic Thrombocytopenia; Glanzmann's Thrombasthenia; Leukocyte Adhesion Deficiency; Pyruvate Kinase Deficiency; Autosomal Recessive Sideroblastic Anemia; Rag 1 Deficiency; Rag 2 Deficiency; Fanconi Anemia; X-Linked Adrenoleukodystrophy; Alpha-mannosidosis; Aspartylgucosaminuria; Chediak-Higashi Syndrome; Cystinosis; Danon Disease; Fabry Disease; Galactosialidosis; Gaucher Disease; Pompe Disease; Hunter Disease; Hurler Disease; or Infantile Free Sialic Acid Storage Disease; or Maroteaux-Lamy; Morquio Type A; Morquio Type B; Mucolipidosis Type I; Mucolipidosis Type II; Multiple Sulfatase Deficiency; Niemann-Pick Disease Type A; Niemann-Pick Disease Type B; Niemann-Pick Disease Type C; Pycnodystosis; Sanfilippo Syndrome Type A; Sanfilippo Syndrome Type B; Sanfilippo Syndrome Type C; Sanfilippo Syndrome Type D; Schindler Disease Types I and II; Sly Disease; Sphinoglipidosis-Encephalopathy; or Wolman Disease.

[0194] 140. A method of making a fusosome of any of embodiments 1-127, comprising:

[0195] a) providing a cell that comprises the nucleic acid, e.g., retroviral nucleic acid, and the fusogen;

[0196] b) culturing the cell under conditions that allow for production of the fusosome, and

[0197] c) separating, enriching, or purifying the fusosome from the cell, thereby making the fusosome.

[0198] Other features, objects, and advantages of the invention will be apparent from the description and drawings, and from the claims.

[0199] Unless otherwise defined, all technical and scientific terms used herein have the same meaning as commonly understood by one of ordinary skill in the art to which this invention belongs. All publications, patent applications, patents, and other references mentioned herein are incorporated by reference in their entirety. For example, all GenBank, Unigene, and Entrez sequences referred to herein, e.g., in any Table herein, are incorporated by reference. Unless otherwise specified, the sequence accession numbers specified herein, including in any Table herein, refer to the database entries current as of May 15, 2018. When one gene or protein references a plurality of sequence accession numbers, all of the sequence variants are encompassed. In addition, the materials, methods, and examples are illustrative only and not intended to be limiting.

### BRIEF DESCRIPTION OF THE DRAWINGS

[0200] The following detailed description of the invention will be better understood when read in conjunction with the appended drawings. For the purpose of illustrating the invention, there are shown in the drawings described herein certain embodiments, which are presently exemplified. It should be understood, however, that the invention is not limited to the precise arrangement and instrumentalities of the embodiments shown in the drawings.

[0201] FIG. 1 quantifies staining of fusosomes with a dye for F-actin.

[0202] FIG. 2 is a graph showing the capacity for fusosomes and parent cells to polymerase actin over a period of 3, 5, and 24 hours.

[0203] FIG. 3 is a table showing size distribution statistics of fusosomes and parental cells as measured by NTA and microscopy.

[0204] FIG. 4 is a table showing the average size and volume of fusosomes and parental cells.

[0205] FIG. 5 is a series of diagrams showing the soluble:insoluble ratio observed for fusosomes or a cell preparation.

[0206] FIG. 6 is a series of diagrams showing MvH(CD8)+F fusosome fusion to target or non-target cells and absolute amount of targeted fusion.

[0207] FIG. 7 is a diagram showing 2-NBDG mean fluorescence intensity in VSV-G fusosomes.

[0208] FIG. 8 is a diagram showing esterase activity in the cytosol of VSV-G fusosomes.

[0209] FIGS. 9A-9B are a series of diagrams showing Cre recombinase delivery by fusosomes as detected by biolumniscent imaging in mice. (A) Ventral image and luminescent signal overlay of exposed liver and spleen of IV fusosome treated mice (1× and 3× concentration). Lower portion is luminescent signal alone. (B) Total flux signal of fusosome targeted spleen and liver; y-scale is on log 10 scale. Mice treated with a concentration of 3× fusosome treatment had a significantly greater signal in the spleen (p=0.0004) than background 72 hours post-treatment.

[0210] FIGS. 10A-10B are a series of diagrams showing Cre recombinase to murine liver and spleen by fusosomes as detected by bioluminescent imaging. (A) From left to right; dorsal image and luminescent signal overlay of excised liver, heart, lungs, kidney, small intestines, pancreas, and spleen collected and imaged within 5 minutes of euthanasia. Lower portion is luminescent signal alone. (B) Total flux signal of fusosome targeted spleen and liver and other tissues; y-scale is on log 10 scale. Mice treated with a concentration of 3× fusosome treatment had a significantly greater signal in the spleen(p<0.0001) as compared to the tissue with the lowest signal (heart).

[0211] FIG. 11 is a table showing delivery of Cre cargo by NivG+F fusosomes via a non-endocytic pathway.

[0212] FIG. 12 is a graph showing GAPDH: Total protein ratios measured by bicinchoninic acid assay in fusosomes and parental cells.

[0213] FIG. 13 is a graph showing lipid: protein ratios measured by bicinchoninic acid assay in fusosomes and parental cells.

[0214] FIG. 14 is a graph showing protein: DNA ratios measured by bicinchoninic acid assay in fusosomes and parental cells.

[0215] FIG. 15 is a graph showing lipids: DNA ratios measured by bicinchoninic acid assay in fusosomes and parental cells.

[0216] FIG. 16 is a graph showing protein levels of the exosome marker CD63 in exosomes and fusosomes.

[0217] FIG. 17 is a graph showing the intensity of calnexin signal detected in fusosomes and parental cells.

[0218] FIG. 18 is a graph showing lipid:DNA ratios determined for fusosomes and parental cells.

[0219] FIGS. 19A-19B are a series of graphs showing the proportion of lipid species as a percentage of total lipids in parental cells, exosomes, and fusosomes.

[0220] FIG. 20 is a series of graphs showing the protein content of parental cells, exosomes, and fusosomes with respect to proteins associated with specific compartments, as indicated.

[0221] FIG. 21 is a series of graphs showing the level of ARRDC1 (left panel) or TSG101 (right panel) as a percentage of total protein content in parental cells, exosomes, and fusosomes.

### DETAILED DESCRIPTION

[0222] The present disclosure provides, at least in part, fusosome methods and compositions for in vivo delivery. In some embodiments, the fusosome comprises a combination of elements that promote specificity for target cells, e.g., one or more of a re-targeted fusogen, a positive target cell-specific regulatory element, and a non-target cell-specific regulatory element. In some embodiments, the fusosome comprises one or more modifications that decrease an immune response against the fusosome.

### I. Definitions

[0223] Terms used in the claims and specification are defined as set forth below unless otherwise specified.

[0224] As used herein, “detectably present”, when used in the context of an exogenous agent being detectably present, means that the exogenous agent itself is detectably present. For instance, if the exogenous agent is a protein, the exogenous protein agent can be detectably present regardless of whether a nucleic acid that encodes it is detectably present or not.

[0225] As used herein, “fusosome” refers to a bilayer of amphipathic lipids enclosing a lumen or cavity and a fusogen that interacts with the amphipathic lipid bilayer. In embodiments, the fusosome comprises a nucleic acid. In some embodiments, the fusosome is a membrane enclosed preparation. In some embodiments, the fusosome is derived from a source cell.

[0226] As used herein, “fusosome composition” refers to a composition comprising one or more fusosomes.

[0227] As used herein, “fusogen” refers to an agent or molecule that creates an interaction between two membrane enclosed lumens. In embodiments, the fusogen facilitates fusion of the membranes. In other embodiments, the fusogen creates a connection, e.g., a pore, between two lumens (e.g., a lumen of a retroviral vector and a cytoplasm of a target cell). In some embodiments, the fusogen comprises a complex of two or more proteins, e.g., wherein neither protein has fusogenic activity alone. In some embodiments, the fusogen comprises a targeting domain.

[0228] As used herein, an “insulator element” refers to a nucleotide sequence that blocks enhancers or prevents heterochromatin spreading. An insulator element can be wild-type or mutant.

[0229] The term “effective amount” as used herein means an amount of a pharmaceutical composition which is sufficient enough to significantly and positively modify the symptoms and/or conditions to be treated (e.g., provide a positive clinical response). The effective amount of an active ingredient for use in a pharmaceutical composition will vary with the particular condition being treated, the severity of the condition, the duration of treatment, the nature of concurrent therapy, the particular active ingredient(s) being employed, the particular pharmaceutically-acceptable excipient(s) and/or carrier(s) utilized, and like factors with the knowledge and expertise of the attending physician.

[0230] An “exogenous agent” as used herein with reference to a virus, VLP or fusosome, refers to an agent that is neither comprised by nor encoded in the corresponding wild-type virus or fusogen made from a corresponding wild-type source cell. In some embodiments, the exogenous agent does not naturally exist, such as a protein or nucleic acid that has a sequence that is altered (e.g., by insertion, deletion, or substitution) relative to a naturally occurring protein. In some embodiments, the exogenous agent does not naturally exist in the source cell. In some embodiments, the exogenous agent exists naturally in the source cell but is exogenous to the virus. In some embodiments, the exogenous agent does not naturally exist in the recipient cell. In some embodiments, the exogenous agent exists naturally in the recipient cell, but is not present at a desired level or at a desired time. In some embodiments, the exogenous agent comprises RNA or protein.

[0231] The term “pharmaceutically acceptable” as used herein, refers to excipients, compositions and/or dosage forms which are, within the scope of sound medical judgment, suitable for use in contact with the tissues of human beings and animals without excessive toxicity, irritation, allergic response, or other problem or complication, commensurate with a reasonable benefit/risk ratio.

[0232] As used herein, a “promoter” refers to a cis-regulatory DNA sequence that, when operably linked to a gene coding sequence, drives transcription of the gene. The promoter may comprise a transcription factor binding sites. In some embodiments, a promoter works in concert with one or more enhancers which are distal to the gene.

[0233] As used herein, a “positive target cell-specific regulatory element” (or positive TCSRE) refers to a nucleic acid sequence that increases the level of an exogenous agent in a target cell compared to in a non-target cell, wherein the nucleic acid encoding the exogenous agent is operably linked to the positive TCSRE. In some embodiments, the positive TCSRE is a functional nucleic acid sequence, e.g., the positive TCSRE can comprise a promoter or enhancer. In some embodiments, the positive TCSRE encodes a functional RNA sequence, e.g., the positive TCSRE can encode a splice site that promotes correct splicing of the RNA in the target cell. In some embodiments, the positive TCSRE encodes a functional protein sequence, or the positive TCSRE can encode a protein sequence that promotes correct post-translational modification of the protein. In some embodiments, the positive TCSRE decreases the level or activity of a downregulator or inhibitor of the exogenous agent.

[0234] As used herein, a “negative target cell-specific regulatory element” (or negative TCSRE) refers to a nucleic acid sequence that decreases the level of an exogenous agent in a non-target cell compared to in a target cell, wherein the nucleic acid encoding the exogenous agent is operably linked to the negative TCSRE. In some embodiments, the negative TCSRE is a functional nucleic acid sequence, e.g., a miRNA recognition site that causes degradation or inhibition of the retroviral nucleic acid in a non-target cell. In some embodiments, the nucleic acid sequence encodes a functional RNA sequence, e.g., the nucleic acid encodes an miRNA sequence present in an mRNA encoding an exogenous protein agent, such that the mRNA is degraded or inhibited in a non-target cell. In some embodiments, the negative TCSRE increases the level or activity of a downregulator or inhibitor of the exogenous agent.

[0235] As used herein, a “non-target cell-specific regulatory element” (or NTCSRE) refers to a nucleic acid sequence that decreases the level of an exogenous agent in a non-target cell compared to in a target cell, wherein the nucleic acid encoding the exogenous agent is operably linked to the NTCSRE. In some embodiments, the NTCSRE is a functional nucleic acid sequence, e.g., a miRNA recognition site that causes degradation or inhibition of the retroviral nucleic acid in a non-target cell. In some embodiments, the nucleic acid sequence encodes a functional RNA sequence, e.g., the nucleic acid encodes an miRNA sequence present in an mRNA encoding an exogenous protein agent, such that the mRNA is degraded or inhibited in a non-target cell. In some embodiments, the NTCSRE increases the level or activity of a downregulator or inhibitor of the exogenous agent. The terms “negative TCSRE” and “NTCSRE” are used interchangeably herein.

[0236] As used herein, a “non-HSC specific regulatory element” refers to a non-target cell-specific regulatory element (NTCSRE), wherein the target cell is a HSC. Thus, a non-HSC specific regulatory element refers to a nucleic acid sequence that decreases the level of an exogenous agent in a non-HSC compared to in a HSC, wherein the nucleic acid encoding the exogenous agent is operably linked to the non-HSC-specific regulatory element.

[0237] As used herein, a “re-targeted fusogen” refers to a fusogen that comprises a targeting moiety having a sequence that is not part of the naturally-occurring form of the fusogen. In embodiments, the fusogen comprises a different targeting moiety relative to the targeting moiety in the naturally-occurring form of the fusogen. In embodiments, the naturally-occurring form of the fusogen lacks a targeting domain, and the re-targeted fusogen comprises a targeting moiety that is absent from the naturally-occurring form of the fusogen. In embodiments, the fusogen is modified to comprise a targeting moiety. In embodiments, the fusogen comprises one or more sequence alterations outside of the targeting moiety relative to the naturally-occurring form of the fusogen, e.g., in a transmembrane domain, fusogenically active domain, or cytoplasmic domain.

[0238] As used herein, a “retroviral nucleic acid” refers to a nucleic acid containing at least the minimal sequence requirements for packaging into a retrovirus or retroviral vector, alone or in combination with a helper cell, helper virus, or helper plasmid. In some embodiments, the retroviral nucleic acid further comprises or encodes an exogenous agent, a positive target cell-specific regulatory element, a non-target cell-specific regulatory element, or a negative TCSRE. In some embodiments, the retroviral nucleic acid comprises one or more of (e.g., all of) a 5′ LTR (e.g., to promote integration), U3 (e.g., to activate viral genomic RNA transcription), R (e.g., a Tat-binding region), U5, a 3′ LTR (e.g., to promote integration), a packaging site (e.g., psi (Ψ)), RRE (e.g., to bind to Rev and promote nuclear export). The retroviral nucleic acid can comprise RNA (e.g., when part of a virion) or DNA (e.g., when being introduced into a source cell or after reverse transcription in a recipient cell). In some embodiments, the retroviral nucleic acid is packaged using a helper cell, helper virus, or helper plasmid which comprises one or more of (e.g., all of) gag, pol, and env.

[0239] As used herein, a “target cell” refers to a cell of a type to which it is desired that a fusosome (e.g., lentiviral vector) deliver an exogenous agent. In embodiments, a target cell is a cell of a specific tissue type or class, e.g., a hematopoietic stem cell. In some embodiments, a target cell is a diseased cell, e.g., a cancer cell. In some embodiments, the fusogen, e.g., re-targeted fusogen (alone or in combination with the positive TCSRE, NTCSRE, negative TCSRE, or any combination thereof) leads to preferential delivery of the exogenous agent to a target cell compared to a non-target cell.

[0240] As used herein a “non-target cell” refers to a cell of a type to which it is not desired that a lentiviral vector delivers an exogenous agent. In some embodiments, a non-target cell is a cell of a specific tissue type or class. In some embodiments, a non-target cell is a non-diseased cell, e.g., a non-cancerous cell. In some embodiments, the fusogen, e.g., re-targeted fusogen (alone or in combination with the positive TCSRE, NTCSRE, negative TCSRE or any combination thereof) leads to lower delivery of the exogenous agent to a non-target cell compared to a target cell.

[0241] As used herein, the terms “treat,” “treating,” or “treatment” refer to ameliorating a disease or disorder, e.g., slowing or arresting or reducing the development of the disease or disorder, e.g., a root cause of the disorder or at least one of the clinical symptoms thereof.

[0242] As used herein, “cytobiologic” refers to a portion of a cell that comprises a lumen and a cell membrane, or a cell having partial or complete nuclear inactivation. In some embodiments, the cytobiologic comprises one or more of a cytoskeleton component, an organelle, and a ribosome. In embodiments, the cytobiologic is an enucleated cell, a microvesicle, or a cell ghost.

### II. Fusosomes, e.g., Cell-Derived Fusosomes

[0243] Fusosomes can take various forms. For example, in some embodiments, a fusosome described herein is derived from a source cell. A fusosome may be or comprise, e.g., an extracellular vesicle, a microvesicle, a nanovesicle, an exosome, an apoptotic body (from apoptotic cells), a microparticle (which may be derived from, e.g., platelets), an ectosome (derivable from, e.g., neutrophiles and monocytes in serum), a prostatosome (obtainable from prostate cancer cells), a cardiosome (derivable from cardiac cells), or any combination thereof. In some embodiments, a fusosome is released naturally from a source cell, and in some embodiments, the source cell is treated to enhance formation of fusosomes. In some embodiments, the fusosome is between about 10-10,000 nm in diameter, e.g., about 30-100 nm in diameter. In some embodiments, the fusosome comprises one or more synthetic lipids.

[0244] In some embodiments, the fusosome is or comprises a virus, e.g., a retrovirus, e.g., a lentivirus. For instance, in some embodiments, the fusosome's bilayer of amphipathic lipids is or comprises the viral envelope. The viral envelope may comprise a fusogen, e.g., a fusogen that is endogenous to the virus or a pseudotyped fusogen. In some embodiments, the fusosome's lumen or cavity comprises a viral nucleic acid, e.g., a retroviral nucleic acid, e.g., a lentiviral nucleic acid. The viral nucleic acid may be a viral genome. In some embodiments, the fusosome further comprises one or more viral non-structural proteins, e.g., in its cavity or lumen.

[0245] Fusosomes may have various properties that facilitate delivery of a payload to a target cell. For instance, in some embodiments, the fusosome and the source cell together comprise nucleic acid(s) sufficient to make a particle that can fuse with a target cell. In embodiments, these nucleic acid(s) encode proteins having one or more of (e.g., all of) the following activities: gag polyprotein activity, polymerase activity, integrase activity, protease activity, and fusogen activity.

[0246] Fusosomes may also comprise various structures that facilitate delivery of a payload to a target cell. For instance, in some embodiments, the fusosome and the source cell together comprise nucleic acid(s) sufficient to make a particle that can fuse with a target cell. In embodiments, these nucleic acid(s) encode proteins having one or more of (e.g., all of) the following activities: gag polyprotein activity, polymerase activity, integrase activity, protease activity, and fusogen activity.

[0247] Fusosomes may also comprise various structures that facilitate delivery of a payload to a target cell. For instance, in some embodiments, the fusosome (e.g., virus, e.g., retrovirus, e.g., lentivirus) comprises one or more of (e.g., all of) the following proteins: gag polyprotein, polymerase (e.g., pol), integrase (e.g., a functional or non-functional variant), protease, and a fusogen. In some embodiments, the fusosome further comprises rev. In some embodiments, one or more of the aforesaid proteins are encoded in the retroviral genome, and in some embodiments, one or more of the aforesaid proteins are provided in trans, e.g., by a helper cell, helper virus, or helper plasmid. In some embodiments, the fusosome nucleic acid (e.g., retroviral nucleic acid) comprises one or more of (e.g., all of) the following nucleic acid sequences: 5′ LTR (e.g., comprising U5 and lacking a functional U3 domain), Psi packaging element (Psi), Central polypurine tract (cPPT) Promoter operatively linked to the payload gene, payload gene (optionally comprising an intron before the open reading frame), Poly A tail sequence, WPRE, and 3′ LTR (e.g., comprising U5 and lacking a functional U3). In some embodiments the fusosome nucleic acid (e.g., retroviral nucleic acid) further comprises one or more insulator element. In some embodiments the fusosome nucleic acid (e.g., retroviral nucleic acid) further comprises one or more miRNA recognition sites. In some embodiments, one or more of the miRNA recognition sites are situated downstream of the poly A tail sequence, e.g., between the poly A tail sequence and the WPRE.

[0248] In some embodiments, a fusosome provided herein is administered to a subject, e.g., a mammal, e.g., a human. In such embodiments, the subject may be at risk of, may have a symptom of, or may be diagnosed with or identified as having, a particular disease or condition (e.g., a disease or condition described herein). In one embodiment, the subject has a genetic deficiency, such as any listed in Table 5 or Table 6. In some embodiments, the fusosome contains nucleic acid sequences encoding an exogenous agent for treating the disease or condition, such as for treating the genetic deficiency.

A. Fusosomes Generated from Viruses

[0249] For instance, in some embodiments, the fusosome (Fusogen, virus, e.g., retrovirus, e.g., lentivirus) comprises one or more of (e.g., all of) the following proteins: gag polyprotein, polymerase (e.g., pol), integrase (e.g., a functional or non-functional variant), protease, and a fusogen. In some embodiments, the fusosome further comprises rev. In some embodiments, one or more of the aforesaid proteins are encoded in the retroviral genome, and in some embodiments, one or more of the aforesaid proteins are provided in trans, e.g., by a helper cell, helper virus, or helper plasmid. In some embodiments, the fusosome nucleic acid (e.g., retroviral nucleic acid) comprises one or more of (e.g., all of) the following nucleic acid sequences: 5′ LTR (e.g., comprising U5 and lacking a functional U3 domain), Psi packaging element (Psi), Central polypurine tract (cPPT) Promoter operatively linked to the payload gene, payload gene (optionally comprising an intron before the open reading frame), Poly A tail sequence, WPRE, and 3′ LTR (e.g., comprising U5 and lacking a functional U3). In some embodiments the fusosome nucleic acid (e.g., retroviral nucleic acid) further comprises one or more insulator element. In some embodiments the fusosome nucleic acid (e.g., retroviral nucleic acid) further comprises one or more miRNA recognition sites. In some embodiments, one or more of the miRNA recognition sites are situated downstream of the poly A tail sequence, e.g., between the poly A tail sequence and the WPRE.

### i) Lentiviral Components and Helper Cells

[0250] In some embodiments, the retroviral nucleic acid comprises one or more of (e.g., all of): a 5′ promoter (e.g., to control expression of the entire packaged RNA), a 5′ LTR (e.g., that includes R (polyadenylation tail signal) and/or U5 which includes a primer activation signal), a primer binding site, a psi packaging signal, a RRE element for nuclear export, a promoter directly upstream of the transgene to control transgene expression, a transgene (or other exogenous agent element), a polypurine tract, and a 3′ LTR (e.g., that includes a mutated U3, a R, and U5). In some embodiments, the retroviral nucleic acid further comprises one or more of a cPPT, a WPRE, and/or an insulator element.

[0251] A retrovirus typically replicates by reverse transcription of its genomic RNA into a linear double-stranded DNA copy and subsequently covalently integrates its genomic DNA into a host genome. Illustrative retroviruses suitable for use in particular embodiments, include, but are not limited to: Moloney murine leukemia virus (M-MuLV), Moloney murine sarcoma virus (MoMSV), Harvey murine sarcoma virus (HaMuSV), murine mammary tumor virus (MuMTV), gibbon ape leukemia virus (GaLV), feline leukemia virus (FLV), spumavirus, Friend murine leukemia virus, Murine Stem Cell Virus (MSCV) and Rous Sarcoma Virus (RSV)) and lentivirus.

[0252] In some embodiments the retrovirus is a Gammretrovirus. In some embodiments the retrovirus is an Epsilonretrovirus. In some embodiments the retrovirus is an Alpharetrovirus. In some embodiments the retrovirus is a Betaretrovirus. In some embodiments the retrovirus is a Deltaretrovirus. In some embodiments the retrovirus is a Lentivirus. In some embodiments the retrovirus is a Spumaretrovirus. In some embodiments the retrovirus is an endogenous retrovirus.

[0253] Illustrative lentiviruses include, but are not limited to: HIV (human immunodeficiency virus; including HIV type 1, and HIV type 2); visna-maedi virus (VMV) virus; the caprine arthritis-encephalitis virus (CAEV); equine infectious anemia virus (EIAV); feline immunodeficiency virus (FIV); bovine immune deficiency virus (BIV); and simian immunodeficiency virus (SIV). In some embodiments, HIV based vector backbones (i.e., HIV cis-acting sequence elements) are used.

[0254] In some embodiments, a vector herein is a nucleic acid molecule capable transferring or transporting another nucleic acid molecule. The transferred nucleic acid is generally linked to, e.g., inserted into, the vector nucleic acid molecule. A vector may include sequences that direct autonomous replication in a cell, or may include sequences sufficient to allow integration into host cell DNA. Useful vectors include, for example, plasmids (e.g., DNA plasmids or RNA plasmids), transposons, cosmids, bacterial artificial chromosomes, and viral vectors. Useful viral vectors include, e.g., replication defective retroviruses and lentiviruses.

[0255] A viral vector can comprise, e.g., a nucleic acid molecule (e.g., a transfer plasmid) that includes virus-derived nucleic acid elements that typically facilitate transfer of the nucleic acid molecule or integration into the genome of a cell or to a viral particle that mediates nucleic acid transfer. Viral particles will typically include various viral components and sometimes also host cell components in addition to nucleic acid(s). A viral vector can comprise, e.g., a virus or viral particle capable of transferring a nucleic acid into a cell, or to the transferred nucleic acid (e.g., as naked DNA). Viral vectors and transfer plasmids can comprise structural and/or functional genetic elements that are primarily derived from a virus. A retroviral vector can comprise a viral vector or plasmid containing structural and functional genetic elements, or portions thereof, that are primarily derived from a retrovirus. A lentiviral vector can comprise a viral vector or plasmid containing structural and functional genetic elements, or portions thereof, including LTRs that are primarily derived from a lentivirus.

[0256] In embodiments, a lentiviral vector (e.g., lentiviral expression vector) may comprise a lentiviral transfer plasmid (e.g., as naked DNA) or an infectious lentiviral particle. With respect to elements such as cloning sites, promoters, regulatory elements, heterologous nucleic acids, etc., it is to be understood that the sequences of these elements can be present in RNA form in lentiviral particles and can be present in DNA form in DNA plasmids.

[0257] In some vectors described herein, at least part of one or more protein coding regions that contribute to or are essential for replication may be absent compared to the corresponding wild-type virus. This makes the viral vector replication-defective. In some embodiments, the vector is capable of transducing a target non-dividing host cell and/or integrating its genome into a host genome.

[0258] The structure of a wild-type retrovirus genome often comprises a 5′ long terminal repeat (LTR) and a 3′ LTR, between or within which are located a packaging signal to enable the genome to be packaged, a primer binding site, integration sites to enable integration into a host cell genome and gag, pol and env genes encoding the packaging components which promote the assembly of viral particles. More complex retroviruses have additional features, such as rev and RRE sequences in HIV, which enable the efficient export of RNA transcripts of the integrated provirus from the nucleus to the cytoplasm of an infected target cell. In the provirus, the viral genes are flanked at both ends by regions called long terminal repeats (LTRs). The LTRs are involved in proviral integration and transcription. LTRs also serve as enhancer-promoter sequences and can control the expression of the viral genes. Encapsidation of the retroviral RNAs occurs by virtue of a psi sequence located at the 5′ end of the viral genome.

[0259] The LTRs themselves are typically similar (e.g., identical) sequences that can be divided into three elements, which are called U3, R and U5. U3 is derived from the sequence unique to the 3′ end of the RNA. R is derived from a sequence repeated at both ends of the RNA and U5 is derived from the sequence unique to the 5′ end of the RNA. The sizes of the three elements can vary considerably among different retroviruses.

[0260] For the viral genome, the site of transcription initiation is typically at the boundary between U3 and R in one LTR and the site of poly (A) addition (termination) is at the boundary between R and U5 in the other LTR. U3 contains most of the transcriptional control elements of the provirus, which include the promoter and multiple enhancer sequences responsive to cellular and in some cases, viral transcriptional activator proteins. Some retroviruses comprise any one or more of the following genes that code for proteins that are involved in the regulation of gene expression: tot, rev, tax and rex.

[0261] With regard to the structural genes gag, pol and env themselves, gag encodes the internal structural protein of the virus. Gag protein is proteolytically processed into the mature proteins MA (matrix), CA (capsid) and NC (nucleocapsid). The pol gene encodes the reverse transcriptase (RT), which contains DNA polymerase, associated RNase H and integrase (IN), which mediate replication of the genome. The env gene encodes the surface (SU) glycoprotein and the transmembrane (TM) protein of the virion, which form a complex that interacts specifically with cellular receptor proteins. This interaction promotes infection, e.g., by fusion of the viral membrane with the cell membrane.

[0262] In a replication-defective retroviral vector genome gag, pol and env may be absent or not functional. The R regions at both ends of the RNA are typically repeated sequences. U5 and U3 represent unique sequences at the 5′ and 3′ ends of the RNA genome respectively.

[0263] Retroviruses may also contain additional genes which code for proteins other than gag, pol and env. Examples of additional genes include (in HIV), one or more of vif, vpr, vpx, vpu, tat, rev and nef. EIAV has (amongst others) the additional gene S2. Proteins encoded by additional genes serve various functions, some of which may be duplicative of a function provided by a cellular protein. In EIAV, for example, tat acts as a transcriptional activator of the viral LTR (Derse and Newbold 1993 Virology 194:530-6; Maury et al. 1994 Virology 200:632-42). It binds to a stable, stem-loop RNA secondary structure referred to as TAR. Rev regulates and co-ordinates the expression of viral genes through rev-response elements (RRE) (Martarano et al. 1994 J. Virol. 68:3102-11). The mechanisms of action of these two proteins are thought to be broadly similar to the analogous mechanisms in the primate viruses. In addition, an EIAV protein, Ttm, has been identified that is encoded by the first exon of tat spliced to the env coding sequence at the start of the transmembrane protein.

[0264] In addition to protease, reverse transcriptase and integrase, non-primate lentiviruses contain a fourth pol gene product which codes for a dUTPase. This may play a role in the ability of these lentiviruses to infect certain non-dividing or slowly dividing cell types.

[0265] In embodiments, a recombinant lentiviral vector (RLV) is a vector with sufficient retroviral genetic information to allow packaging of an RNA genome, in the presence of packaging components, into a viral particle capable of infecting a target cell. Infection of the target cell can comprise reverse transcription and integration into the target cell genome. The RLV typically carries non-viral coding sequences which are to be delivered by the vector to the target cell. In embodiments, an RLV is incapable of independent replication to produce infectious retroviral particles within the target cell. Usually the RLV lacks a functional gag-pol and/or env gene and/or other genes involved in replication. The vector may be configured as a split-intron vector, e.g., as described in PCT patent application WO 99/15683, which is herein incorporated by reference in its entirety.

[0266] In some embodiments, the lentiviral vector comprises a minimal viral genome, e.g., the viral vector has been manipulated so as to remove the non-essential elements and to retain the essential elements in order to provide the required functionality to infect, transduce and deliver a nucleotide sequence of interest to a target host cell, e.g., as described in WO 98/17815, which is herein incorporated by reference in its entirety.

[0267] A minimal lentiviral genome may comprise, e.g., (5′)R-US-one or more first nucleotide sequences-U3-R(3′). However, the plasmid vector used to produce the lentiviral genome within a source cell can also include transcriptional regulatory control sequences operably linked to the lentiviral genome to direct transcription of the genome in a source cell. These regulatory sequences may comprise the natural sequences associated with the transcribed retroviral sequence, e.g., the 5′ U3 region, or they may comprise a heterologous promoter such as another viral promoter, for example the CMV promoter. Some lentiviral genomes comprise additional sequences to promote efficient virus production. For example, in the case of HIV, rev and RRE sequences may be included. Alternatively or combination, codon optimization may be used, e.g., the gene encoding the exogenous agent may be codon optimized, e.g., as described in WO 01/79518, which is herein incorporated by reference in its entirety. Alternative sequences which perform a similar or the same function as the rev/RRE system may also be used. For example, a functional analogue of the rev/RRE system is found in the Mason Pfizer monkey virus. This is known as CTE and comprises an RRE-type sequence in the genome which is believed to interact with a factor in the infected cell. The cellular factor can be thought of as a rev analogue. Thus, CTE may be used as an alternative to the rev/RRE system. In addition, the Rex protein of HTLV-I can functionally replace the Rev protein of HIV-I. Rev and Rex have similar effects to IRE-BP.

[0268] In some embodiments, a retroviral nucleic acid (e.g., a lentiviral nucleic acid, e.g., a primate or non-primate lentiviral nucleic acid) (1) comprises a deleted gag gene wherein the deletion in gag removes one or more nucleotides downstream of about nucleotide 350 or 354 of the gag coding sequence; (2) has one or more accessory genes absent from the retroviral nucleic acid; (3) lacks the tat gene but includes the leader sequence between the end of the 5′ LTR and the ATG of gag; and (4) combinations of (1), (2) and (3). In an embodiment the lentiviral vector comprises all of features (1) and (2) and (3). This strategy is described in more detail in WO 99/32646, which is herein incorporated by reference in its entirety.

[0269] In some embodiments, a primate lentivirus minimal system requires none of the HIV/SIV additional genes vif, vpr, vpx, vpu, tat, rev and nef for either vector production or for transduction of dividing and non-dividing cells. In some embodiments, an EIAV minimal vector system does not require S2 for either vector production or for transduction of dividing and non-dividing cells.

[0270] The deletion of additional genes may permit vectors to be produced without the genes associated with disease in lentiviral (e.g. HIV) infections. In particular, tat is associated with disease. Secondly, the deletion of additional genes permits the vector to package more heterologous DNA. Thirdly, genes whose function is unknown, such as S2, may be omitted, thus reducing the risk of causing undesired effects. Examples of minimal lentiviral vectors are disclosed in WO 99/32646 and in WO 98/17815.

[0271] In some embodiments, the retroviral nucleic acid is devoid of at least tat and S2 (if it is an EIAV vector system), and possibly also vif, vpr, vpx, vpu and nef. In some embodiments, the retroviral nucleic acid is also devoid of rev, RRE, or both.

[0272] In some embodiments the retroviral nucleic acid comprises vpx. The Vpx polypeptide binds to and induces the degradation of the SAMHD1 restriction factor, which degrades free dNTPs in the cytoplasm. Thus, the concentration of free dNTPs in the cytoplasm increases as Vpx degrades SAMHD1 and reverse transcription activity is increased, thus facilitating reverse transcription of the retroviral genome and integration into the target cell genome.

[0273] Different cells differ in their usage of particular codons. This codon bias corresponds to a bias in the relative abundance of particular tRNAs in the cell type. By altering the codons in the sequence so that they are tailored to match with the relative abundance of corresponding tRNAs, it is possible to increase expression. By the same token, it is possible to decrease expression by deliberately choosing codons for which the corresponding tRNAs are known to be rare in the particular cell type. Thus, an additional degree of translational control is available. An additional description of codon optimization is found, e.g., in WO 99/41397, which is herein incorporated by reference in its entirety.

[0274] Many viruses, including HIV and other lentiviruses, use a large number of rare codons and by changing these to correspond to commonly used mammalian codons, increased expression of the packaging components in mammalian producer cells can be achieved.

[0275] Codon optimization has a number of other advantages. By virtue of alterations in their sequences, the nucleotide sequences encoding the packaging components may have RNA instability sequences (INS) reduced or eliminated from them. At the same time, the amino acid sequence coding sequence for the packaging components is retained so that the viral components encoded by the sequences remain the same, or at least sufficiently similar that the function of the packaging components is not compromised. In some embodiments, codon optimization also overcomes the Rev/RRE requirement for export, rendering optimized sequences Rev independent. In some embodiments, codon optimization also reduces homologous recombination between different constructs within the vector system (for example between the regions of overlap in the gag-pol and env open reading frames). In some embodiments, codon optimization leads to an increase in viral titer and/or improved safety.

[0276] In some embodiments, only codons relating to INS are codon optimized. In other embodiments, the sequences are codon optimized in their entirety, with the exception of the sequence encompassing the frameshift site of gag-pol.

[0277] The gag-pol gene comprises two overlapping reading frames encoding the gag-pol proteins. The expression of both proteins depends on a frameshift during translation. This frameshift occurs as a result of ribosome “slippage” during translation. This slippage is thought to be caused at least in part by ribosome-stalling RNA secondary structures. Such secondary structures exist downstream of the frameshift site in the gag-pol gene. For HIV, the region of overlap extends from nucleotide 1222 downstream of the beginning of gag (wherein nucleotide 1 is the A of the gag ATG) to the end of gag (nt 1503). Consequently, a 281 bp fragment spanning the frameshift site and the overlapping region of the two reading frames is preferably not codon optimized. In some embodiments, retaining this fragment will enable more efficient expression of the gag-pol proteins. For EIAV, the beginning of the overlap is at nt 1262 (where nucleotide 1 is the A of the gag ATG). The end of the overlap is at nt 1461. In order to ensure that the frameshift site and the gag-pol overlap are preserved, the wild type sequence may be retained from nt 1156 to 1465.

[0278] Derivations from optimal codon usage may be made, for example, in order to accommodate convenient restriction sites, and conservative amino acid changes may be introduced into the gag-pol proteins.

[0279] In some embodiments, codon optimization is based on codons with poor codon usage in mammalian systems. The third and sometimes the second and third base may be changed.

[0280] Due to the degenerate nature of the genetic code, it will be appreciated that numerous gag-pol sequences can be achieved by a skilled worker. Also, there are many retroviral variants described which can be used as a starting point for generating a codon optimized gag-pol sequence. Lentiviral genomes can be quite variable. For example there are many quasi-species of HIV-I which are still functional. This is also the case for EIAV. These variants may be used to enhance particular parts of the transduction process. Examples of HIV-I variants may be found in the HIV databases maintained by Los Alamos National Laboratory. Details of EIAV clones may be found at the NCBI database maintained by the National Institutes of Health.

[0281] The strategy for codon optimized gag-pol sequences can be used in relation to any retrovirus, e.g., EIAV, FIV, BIV, CAEV, VMR, SIV, HIV-I and HIV-2. In addition this method could be used to increase expression of genes from HTLV-I, HTLV-2, HFV, HSRV and human endogenous retroviruses (HERV), MLV and other retroviruses.

[0282] As described above, the packaging components for a retroviral vector can include expression products of gag, pol and env genes. In addition, packaging can utilize a short sequence of 4 stem loops followed by a partial sequence from gag and env as a packaging signal. Thus, inclusion of a deleted gag sequence in the retroviral vector genome (in addition to the full gag sequence on the packaging construct) can be used. In embodiments, the retroviral vector comprises a packaging signal that comprises from 255 to 360 nucleotides of gag in vectors that still retain env sequences, or about 40 nucleotides of gag in a particular combination of splice donor mutation, gag and env deletions. In some embodiments, the retroviral vector includes a gag sequence which comprises one or more deletions, e.g., the gag sequence comprises about 360 nucleotides derivable from the N-terminus.

[0283] The retroviral vector, helper cell, helper virus, or helper plasmid may comprise retroviral structural and accessory proteins, for example gag, pol, env, tat, rev, vif, vpr, vpu, vpx, or nef proteins or other retroviral proteins. In some embodiments the retroviral proteins are derived from the same retrovirus. In some embodiments the retroviral proteins are derived from more than one retrovirus, e.g. 2, 3, 4, or more retroviruses.

[0284] The gag and pol coding sequences are generally organized as the Gag-Pol Precursor in native lentivirus. The gag sequence codes for a 55-kD Gag precursor protein, also called p55. The p55 is cleaved by the virally encoded protease4 (a product of the pol gene) during the process of maturation into four smaller proteins designated MA (matrix [p17]), CA (capsid [p24]), NC (nucleocapsid [p9]), and p6. The pol precursor protein is cleaved away from Gag by a virally encoded protease, and further digested to separate the protease (p10), RT (p50), RNase H (p15), and integrase (p31) activities.

[0285] Native Gag-Pol sequences can be utilized in a helper vector (e.g., helper plasmid or helper virus), or modifications can be made. These modifications include, chimeric Gag-Pol, where the Gag and Pol sequences are obtained from different viruses (e.g., different species, subspecies, strains, clades, etc.), and/or where the sequences have been modified to improve transcription and/or translation, and/or reduce recombination.

[0286] In various examples, the retroviral nucleic acid includes a polynucleotide encoding a 150-250 (e.g., 168) nucleotide portion of a gag protein that (i) includes a mutated INS1 inhibitory sequence that reduces restriction of nuclear export of RNA relative to wild-type INS1, (ii) contains two nucleotide insertion that results in frame shift and premature termination, and/or (iii) does not include INS2, INS3, and INS4 inhibitory sequences of gag.

[0287] In some embodiments, a vector described herein is a hybrid vector that comprises both retroviral (e.g., lentiviral) sequences and non-lentiviral viral sequences. In some embodiments, a hybrid vector comprises retroviral e.g., lentiviral, sequences for reverse transcription, replication, integration and/or packaging.

[0288] According to certain specific embodiments, most or all of the viral vector backbone sequences are derived from a lentivirus, e.g., HIV-1. However, it is to be understood that many different sources of retroviral and/or lentiviral sequences can be used, or combined and numerous substitutions and alterations in certain of the lentiviral sequences may be accommodated without impairing the ability of a transfer vector to perform the functions described herein. A variety of lentiviral vectors are described in Naldini et al., (1996a, 1996b, and 1998); Zufferey et al., (1997); Dull et al., 1998, U.S. Pat. Nos. 6,013,516; and 5,994,136, many of which may be adapted to produce a retroviral nucleic acid.

[0289] At each end of the provirus, long terminal repeats (LTRs) are typically found. An LTR typically comprises a domain located at the ends of retroviral nucleic acid which, in their natural sequence context, are direct repeats and contain U3, R and U5 regions. LTRs generally promote the expression of retroviral genes (e.g., promotion, initiation and polyadenylation of gene transcripts) and viral replication. The LTR can comprise numerous regulatory signals including transcriptional control elements, polyadenylation signals and sequences for replication and integration of the viral genome. The viral LTR is typically divided into three regions called U3, R and U5. The U3 region typically contains the enhancer and promoter elements. The U5 region is typically the sequence between the primer binding site and the R region and can contain the polyadenylation sequence. The R (repeat) region can be flanked by the U3 and U5 regions. The LTR is typically composed of U3, R and U5 regions and can appear at both the 5′ and 3′ ends of the viral genome. In some embodiments, adjacent to the 5′ LTR are sequences for reverse transcription of the genome (the tRNA primer binding site) and for efficient packaging of viral RNA into particles (the Psi site).

[0290] A packaging signal can comprise a sequence located within the retroviral genome which mediate insertion of the viral RNA into the viral capsid or particle, see e.g., Clever et al., 1995. J. of Virology, Vol. 69, No. 4; pp. 2101-2109. Several retroviral vectors use a minimal packaging signal (a psi [Ψ] sequence) for encapsidation of the viral genome.

[0291] In various embodiments, retroviral nucleic acids comprise modified 5′ LTR and/or 3′ LTRs. Either or both of the LTR may comprise one or more modifications including, but not limited to, one or more deletions, insertions, or substitutions. Modifications of the 3′ LTR are often made to improve the safety of lentiviral or retroviral systems by rendering viruses replication-defective, e.g., virus that is not capable of complete, effective replication such that infective virions are not produced (e.g., replication-defective lentiviral progeny).

[0292] In some embodiments, a vector is a self-inactivating (SIN) vector, e.g., replication-defective vector, e.g., retroviral or lentiviral vector, in which the right (3′) LTR enhancer-promoter region, known as the U3 region, has been modified (e.g., by deletion or substitution) to prevent viral transcription beyond the first round of viral replication. This is because the right (3′) LTR U3 region can be used as a template for the left (5′) LTR U3 region during viral replication and, thus, absence of the U3 enhancer-promoter inhibits viral replication. In embodiments, the 3′ LTR is modified such that the U5 region is removed, altered, or replaced, for example, with an exogenous poly(A) sequence The 3′ LTR, the 5′ LTR, or both 3′ and 5′ LTRs, may be modified LTRs.

[0293] In some embodiments, the U3 region of the 5′ LTR is replaced with a heterologous promoter to drive transcription of the viral genome during production of viral particles. Examples of heterologous promoters which can be used include, for example, viral simian virus 40 (SV40) (e.g., early or late), cytomegalovirus (CMV) (e.g., immediate early), Moloney murine leukemia virus (MoMLV), Rous sarcoma virus (RSV), and herpes simplex virus (HSV) (thymidine kinase) promoters. In some embodiments, promoters are able to drive high levels of transcription in a Tat-independent manner. In certain embodiments, the heterologous promoter has additional advantages in controlling the manner in which the viral genome is transcribed. For example, the heterologous promoter can be inducible, such that transcription of all or part of the viral genome will occur only when the induction factors are present. Induction factors include, but are not limited to, one or more chemical compounds or the physiological conditions such as temperature or pH, in which the host cells are cultured.

[0294] In some embodiments, viral vectors comprise a TAR (trans-activation response) element, e.g., located in the R region of lentiviral (e.g., HIV) LTRs. This element interacts with the lentiviral trans-activator (tat) genetic element to enhance viral replication. However, this element is not required, e.g., in embodiments wherein the U3 region of the 5′ LTR is replaced by a heterologous promoter.

[0295] The R region, e.g., the region within retroviral LTRs beginning at the start of the capping group (i.e., the start of transcription) and ending immediately prior to the start of the poly A tract can be flanked by the U3 and U5 regions. The R region plays a role during reverse transcription in the transfer of nascent DNA from one end of the genome to the other.

[0296] The retroviral nucleic acid can also comprise a FLAP element, e.g., a nucleic acid whose sequence includes the central polypurine tract and central termination sequences (cPPT and CTS) of a retrovirus, e.g., HIV-1 or HIV-2. Suitable FLAP elements are described in U.S. Pat. No. 6,682,907 and in Zennou, et al., 2000, Cell, 101:173, which are herein incorporated by reference in their entireties. During HIV-1 reverse transcription, central initiation of the plus-strand DNA at the central polypurine tract (cPPT) and central termination at the central termination sequence (CTS) can lead to the formation of a three-stranded DNA structure: the HIV-1 central DNA flap. In some embodiments, the retroviral or lentiviral vector backbones comprise one or more FLAP elements upstream or downstream of the gene encoding the exogenous agent. For example, in some embodiments a transfer plasmid includes a FLAP element, e.g., a FLAP element derived or isolated from HIV-1.

[0297] In embodiments, a retroviral or lentiviral nucleic acid comprises one or more export elements, e.g., a cis-acting post-transcriptional regulatory element which regulates the transport of an RNA transcript from the nucleus to the cytoplasm of a cell. Examples of RNA export elements include, but are not limited to, the human immunodeficiency virus (HIV) rev response element (RRE) (see e.g., Cullen et al., 1991. J. Virol. 65: 1053; and Cullen et al., 1991. Cell 58: 423), and the hepatitis B virus post-transcriptional regulatory element (HPRE), which are herein incorporated by reference in their entireties. Generally, the RNA export element is placed within the 3′ UTR of a gene, and can be inserted as one or multiple copies.

[0298] In some embodiments, expression of heterologous sequences in viral vectors is increased by incorporating one or more of, e.g., all of, posttranscriptional regulatory elements, polyadenylation sites, and transcription termination signals into the vectors. A variety of posttranscriptional regulatory elements can increase expression of a heterologous nucleic acid at the protein, e.g., woodchuck hepatitis virus posttranscriptional regulatory element (WPRE; Zufferey et al., 1999, J. Virol., 73:2886); the posttranscriptional regulatory element present in hepatitis B virus (HPRE) (Huang et al., Mol. Cell. Biol., 5:3864); and the like (Liu et al., 1995, Genes Dev., 9:1766), each of which is herein incorporated by reference in its entirety. In some embodiments, a retroviral nucleic acid described herein comprises a posttranscriptional regulatory element such as a WPRE or HPRE

[0299] In some embodiments, a retroviral nucleic acid described herein lacks or does not comprise a posttranscriptional regulatory element such as a WPRE or HPRE.

[0300] Elements directing the termination and polyadenylation of the heterologous nucleic acid transcripts may be included, e.g., to increases expression of the exogenous agent. Transcription termination signals may be found downstream of the polyadenylation signal. In some embodiments, vectors comprise a polyadenylation sequence 3′ of a polynucleotide encoding the exogenous agent. A polyA site may comprise a DNA sequence which directs both the termination and polyadenylation of the nascent RNA transcript by RNA polymerase II. Polyadenylation sequences can promote mRNA stability by addition of a polyA tail to the 3′ end of the coding sequence and thus, contribute to increased translational efficiency. Illustrative examples of polyA signals that can be used in a retroviral nucleic acid, include AATAAA, ATTAAA, AGTAAA, a bovine growth hormone polyA sequence (BGHpA), a rabbit β-globin polyA sequence (rβgpA), or another suitable heterologous or endogenous polyA sequence.

[0301] In some embodiments, a retroviral or lentiviral vector further comprises one or more insulator elements, e.g., an insulator element described herein.

[0302] In various embodiments, the vectors comprise a promoter operably linked to a polynucleotide encoding an exogenous agent. The vectors may have one or more LTRs, wherein either LTR comprises one or more modifications, such as one or more nucleotide substitutions, additions, or deletions. The vectors may further comprise one of more accessory elements to increase transduction efficiency (e.g., a cPPT/FLAP), viral packaging (e.g., a Psi (Ψ) packaging signal, RRE), and/or other elements that increase exogenous gene expression (e.g., poly (A) sequences), and may optionally comprise a WPRE or HPRE.

[0303] In some embodiments, a lentiviral nucleic acid comprises one or more of, e.g., all of, e.g., from 5′ to 3′, a promoter (e.g., CMV), an R sequence (e.g., comprising TAR), a U5 sequence (e.g., for integration), a PBS sequence (e.g., for reverse transcription), a DIS sequence (e.g., for genome dimerization), a psi packaging signal, a partial gag sequence, an RRE sequence (e.g., for nuclear export), a cPPT sequence (e.g., for nuclear import), a promoter to drive expression of the exogenous agent, a gene encoding the exogenous agent, a WPRE sequence (e.g., for efficient transgene expression), a PPT sequence (e.g., for reverse transcription), an R sequence (e.g., for polyadenylation and termination), and a U5 signal (e.g., for integration).

### ii) Vectors Engineered to Remove Splice Sites

[0304] Some lentiviral vectors integrate inside active genes and possess strong splicing and polyadenylation signals that could lead to the formation of aberrant and possibly truncated transcripts.

[0305] Mechanisms of proto-oncogene activation may involve the generation of chimeric transcripts originating from the interaction of promoter elements or splice sites contained in the genome of the insertional mutagen with the cellular transcriptional unit targeted by integration (Gabriel et al. 2009. Nat Med 15: 1431-1436; Bokhoven, et al. J Virol 83:283-29). Chimeric fusion transcripts comprising vector sequences and cellular mRNAs can be generated either by read-through transcription starting from vector sequences and proceeding into the flanking cellular genes, or vice versa.

[0306] In some embodiments, a lentiviral nucleic acid described herein comprises a lentiviral backbone in which at least two of the splice sites have been eliminated, e.g., to improve the safety profile of the lentiviral vector. Species of such splice sites and methods of identification are described in WO2012156839A2, all of which is included by reference.

iii) Retroviral Production Methods

[0307] Large scale viral particle production is often useful to achieve a desired viral titer. Viral particles can be produced by transfecting a transfer vector into a packaging cell line that comprises viral structural and/or accessory genes, e.g., gag, pol, env, tat, rev, vif, vpr, vpu, vpx, or nef genes or other retroviral genes.

[0308] In embodiments, the packaging vector is an expression vector or viral vector that lacks a packaging signal and comprises a polynucleotide encoding one, two, three, four or more viral structural and/or accessory genes. Typically, the packaging vectors are included in a packaging cell, and are introduced into the cell via transfection, transduction or infection. A retroviral, e.g., lentiviral, transfer vector can be introduced into a packaging cell line, via transfection, transduction or infection, to generate a source cell or cell line. The packaging vectors can be introduced into human cells or cell lines by standard methods including, e.g., calcium phosphate transfection, lipofection or electroporation. In some embodiments, the packaging vectors are introduced into the cells together with a dominant selectable marker, such as neomycin, hygromycin, puromycin, blastocidin, zeocin, thymidine kinase, DHFR, Gln synthetase or ADA, followed by selection in the presence of the appropriate drug and isolation of clones. A selectable marker gene can be linked physically to genes encoding by the packaging vector, e.g., by IRES or self cleaving viral peptides.

[0309] Packaging cell lines include cell lines that do not contain a packaging signal, but do stably or transiently express viral structural proteins and replication enzymes (e.g., gag, pol and env) which can package viral particles. Any suitable cell line can be employed, e.g., mammalian cells, e.g., human cells. Suitable cell lines which can be used include, for example, CHO cells, BHK cells, MDCK cells, C3H 10T1/2 cells, FLY cells, Psi-2 cells, BOSC 23 cells, PA317 cells, WEHI cells, COS cells, BSC 1 cells, BSC 40 cells, BMT 10 cells, VERO cells, W138 cells, MRCS cells, A549 cells, HT1080 cells, 293 cells, 293T cells, B-50 cells, 3T3 cells, NIH3T3 cells, HepG2 cells, Saos-2 cells, Huh7 cells, HeLa cells, W163 cells, 211 cells, and 211A cells. In embodiments, the packaging cells are 293 cells, 293T cells, or A549 cells.

[0310] A source cell line includes a cell line which is capable of producing recombinant retroviral particles, comprising a packaging cell line and a transfer vector construct comprising a packaging signal. Methods of preparing viral stock solutions are illustrated by, e.g., Y. Soneoka et al. (1995) Nucl. Acids Res. 23:628-633, and N. R. Landau et al. (1992) J. Virol. 66:5110-5113, which are incorporated herein by reference. Infectious virus particles may be collected from the packaging cells, e.g., by cell lysis, or collection of the supernatant of the cell culture. Optionally, the collected virus particles may be enriched or purified.

### iv) Packaging Plasmids and Cell Lines

[0311] In some embodiments, the source cell comprises one or more plasmids coding for viral structural proteins and replication enzymes (e.g., gag, pol and env) which can package viral particles. In some embodiments, the sequences coding for at least two of the gag, pol, and env precursors are on the same plasmid. In some embodiments, the sequences coding for the gag, pol, and env precursors are on different plasmids. In some embodiments, the sequences coding for the gag, pol, and env precursors have the same expression signal, e.g., promoter. In some embodiments, the sequences coding for the gag, pol, and env precursors have a different expression signal, e.g., different promoters. In some embodiments, expression of the gag, pol, and env precursors is inducible. In some embodiments, the plasmids coding for viral structural proteins and replication enzymes are transfected at the same time or at different times. In some embodiments, the plasmids coding for viral structural proteins and replication enzymes are transfected at the same time or at a different time from the packaging vector.

[0312] In some embodiments, the source cell line comprises one or more stably integrated viral structural genes. In some embodiments expression of the stably integrated viral structural genes is inducible.

[0313] In some embodiments, expression of the viral structural genes is regulated at the transcriptional level. In some embodiments, expression of the viral structural genes is regulated at the translational level. In some embodiments, expression of the viral structural genes is regulated at the post-translational level.

[0314] In some embodiments, expression of the viral structural genes is regulated by a tetracycline (Tet)-dependent system, in which a Tet-regulated transcriptional repressor (Tet-R) binds to DNA sequences included in a promoter and represses transcription by steric hindrance (Yao et al, 1998; Jones et al, 2005). Upon addition of doxycycline (dox), Tet-R is released, allowing transcription. Multiple other suitable transcriptional regulatory promoters, transcription factors, and small molecule inducers are suitable to regulate transcription of viral structural genes.

[0315] In some embodiments, the third-generation lentivirus components, human immunodeficiency virus type 1 (HIV) Rev, Gag/Pol, and an envelope under the control of Tet-regulated promoters and coupled with antibiotic resistance cassettes are separately integrated into the source cell genome. In some embodiments the source cell only has one copy of each of Rev, Gag/Pol, and an envelope protein integrated into the genome.

[0316] In some embodiments a nucleic acid encoding the exogenous agent (e.g., a retroviral nucleic acid encoding the exogenous agent) is also integrated into the source cell genome. In some embodiments a nucleic acid encoding the exogenous agent is maintained episomally. In some embodiments a nucleic acid encoding the exogenous agent is transfected into the source cell that has stably integrated Rev, Gag/Pol, and an envelope protein in the genome. See, e.g., Milani et al. EMBO Molecular Medicine, 2017, which is herein incorporated by reference in its entirety.

[0317] In some embodiments, a retroviral nucleic acid described herein is unable to undergo reverse transcription. Such a nucleic acid, in embodiments, is able to transiently express an exogenous agent. The retrovirus or VLP, may comprise a disabled reverse transcriptase protein, or may not comprise a reverse transcriptase protein. In embodiments, the retroviral nucleic acid comprises a disabled primer binding site (PBS) and/or att site. In embodiments, one or more viral accessory genes, including rev, tat, vif, nef, vpr, vpu, vpx and S2 or functional equivalents thereof, are disabled or absent from the retroviral nucleic acid. In embodiments, one or more accessory genes selected from S2, rev and tat are disabled or absent from the retroviral nucleic acid.

### v) Strategies for Packaging a Retroviral Nucleic Acid

[0318] Typically, modern retroviral vector systems consist of viral genomes bearing cis-acting vector sequences for transcription, reverse-transcription, integration, translation and packaging of viral RNA into the viral particles, and (2) producer cells lines which express the trans-acting retroviral gene sequences (e.g., gag, pol and env) needed for production of virus particles. By separating the cis- and trans-acting vector sequences completely, the virus is unable to maintain replication for more than one cycle of infection. Generation of live virus can be avoided by a number of strategies, e.g., by minimizing the overlap between the cis- and trans-acting sequences to avoid recombination.

[0319] A viral vector particle which comprises a sequence that is devoid of or lacking viral RNA may be the result of removing or eliminating the viral RNA from the sequence. In one embodiment this may be achieved by using an endogenous packaging signal binding site on gag. Alternatively, the endogenous packaging signal binding site is on pol. In this embodiment, the RNA which is to be delivered will contain a cognate packaging signal. In another embodiment, a heterologous binding domain (which is heterologous to gag) located on the RNA to be delivered, and a cognate binding site located on gag or pol, can be used to ensure packaging of the RNA to be delivered. The heterologous sequence could be non-viral or it could be viral, in which case it may be derived from a different virus. The vector particles could be used to deliver therapeutic RNA, in which case functional integrase and/or reverse transcriptase is not required. These vector particles could also be used to deliver a therapeutic gene of interest, in which case pol is typically included.

[0320] In an embodiment, gag-pol are altered, and the packaging signal is replaced with a corresponding packaging signal. In this embodiment, the particle can package the RNA with the new packaging signal. The advantage of this approach is that it is possible to package an RNA sequence which is devoid of viral sequence for example, RNAi.

[0321] An alternative approach is to rely on over-expression of the RNA to be packaged. In one embodiment the RNA to be packaged is over-expressed in the absence of any RNA containing a packaging signal. This may result in a significant level of therapeutic RNA being packaged, and that this amount is sufficient to transduce a cell and have a biological effect.

[0322] In some embodiments, a polynucleotide comprises a nucleotide sequence encoding a viral gag protein or retroviral gag and pol proteins, wherein the gag protein or pol protein comprises a heterologous RNA binding domain capable of recognising a corresponding sequence in an RNA sequence to facilitate packaging of the RNA sequence into a viral vector particle.

[0323] In some embodiments, the heterologous RNA binding domain comprises an RNA binding domain derived from a bacteriophage coat protein, a Rev protein, a protein of the U1 small nuclear ribonucleoprotein particle, a Nova protein, a TF111A protein, a TIS11 protein, a trp RNA-binding attenuation protein (TRAP) or a pseudouridine synthase.

[0324] In some embodiments, a method herein comprises detecting or confirming the absence of replication competent retrovirus. The methods may include assessing RNA levels of one or more target genes, such as viral genes, e.g. structural or packaging genes, from which gene products are expressed in certain cells infected with a replication-competent retrovirus, such as a gammaretrovirus or lentivirus, but not present in a viral vector used to transduce cells with a heterologous nucleic acid and not, or not expected to be, present and/or expressed in cells not containing replication-competent retrovirus. Replication competent retrovirus may be determined to be present if RNA levels of the one or more target genes is higher than a reference value, which can be measured directly or indirectly, e.g. from a positive control sample containing the target gene. For further disclosure, see WO2018023094A1.

### vi) Repression of a Gene Encoding an Exogenous Agent in a Source Cell

[0325] (Over-)expressed protein in the source cell may have an indirect or direct effect on vector virion assembly and/or infectivity. Incorporation of the exogenous agent into vector virions may also impact downstream processing of vector particles.

[0326] In some embodiments, a tissue-specific promoter is used to limit expression of the exogenous agent in source cells. In some embodiments, a heterologous translation control system is used in eukaryotic cell cultures to repress the translation of the exogenous agent in source cells. More specifically, the retroviral nucleic acid may comprise a binding site operably linked to the gene encoding the exogenous agent, wherein the binding site is capable of interacting with an RNA-binding protein such that translation of the exogenous agent is repressed or prevented in the source cell.

[0327] In some embodiments, the RNA-binding protein is tryptophan RNA-binding attenuation protein (TRAP), for example bacterial tryptophan RNA-binding attenuation protein. The use of an RNA-binding protein (e.g. the bacterial trp operon regulator protein, tryptophan RNA-binding attenuation protein, TRAP), and RNA targets to which it binds, will repress or prevent transgene translation within a source cell. This system is referred to as the Transgene Repression In vector Production cell system or TRIP system.

[0328] In embodiments, the placement of a binding site for an RNA binding protein (e.g., a TRAP-binding sequence, tbs) upstream of the NOI translation initiation codon allows specific repression of translation of mRNA derived from the internal expression cassette, while having no detrimental effect on production or stability of vector RNA. The number of nucleotides between the tbs and translation initiation codon of the gene encoding the exogenous agent may be varied from 0 to 12 nucleotides. The tbs may be placed downstream of an internal ribosome entry site (IRES) to repress translation of the gene encoding the exogenous agent in a multicistronic mRNA.

vii) Kill Switch Systems and Amplification

[0329] In some embodiments, a polynucleotide or cell harboring the gene encoding the exogenous agent utilizes a suicide gene, e.g., an inducible suicide gene, to reduce the risk of direct toxicity and/or uncontrolled proliferation. In specific aspects, the suicide gene is not immunogenic to the host cell harboring the exogenous agent. Examples of suicide genes include caspase-9, caspase-8, or cytosine deaminase. Caspase-9 can be activated using a specific chemical inducer of dimerization (CID).

[0330] In certain embodiments, vectors comprise gene segments that cause target cells, e.g., immune effector cells, e.g., T cells, to be susceptible to negative selection in vivo. For instance, the transduced cell can be eliminated as a result of a change in the in vivo condition of the individual. The negative selectable phenotype may result from the insertion of a gene that confers sensitivity to an administered agent, for example, a compound. Negative selectable genes are known in the art, and include, inter alia the following: the Herpes simplex virus type I thymidine kinase (HSV-I TK) gene (Wigler et al., Cell 11:223, 1977) which confers ganciclovir sensitivity; the cellular hypoxanthine phosphribosyltransferase (HPRT) gene, the cellular adenine phosphoribosyltransferase (APRT) gene, and bacterial cytosine deaminase, (Mullen et al., Proc. Natl. Acad. Sci. USA. 89:33 (1992)).

[0331] In some embodiments, transduced cells, e.g., immune effector cells, such as T cells, comprise a polynucleotide further comprising a positive marker that enables the selection of cells of the negative selectable phenotype in vitro. The positive selectable marker may be a gene which, upon being introduced into the target cell, expresses a dominant phenotype permitting positive selection of cells carrying the gene. Genes of this type include, inter alia, hygromycin-B phosphotransferase gene (hph) which confers resistance to hygromycin B, the amino glycoside phosphotransferase gene (neo or aph) from Tn5 which codes for resistance to the antibiotic G418, the dihydrofolate reductase (DHFR) gene, the adenosine deaminase gene (ADA), and the multi-drug resistance (MDR) gene.

[0332] In some embodiments, the positive selectable marker and the negative selectable element are linked such that loss of the negative selectable element necessarily also is accompanied by loss of the positive selectable marker. For instance, the positive and negative selectable markers can be fused so that loss of one obligatorily leads to loss of the other. An example of a fused polynucleotide that yields as an expression product a polypeptide that confers both the desired positive and negative selection features described above is a hygromycin phosphotransferase thymidine kinase fusion gene (HyTK). Expression of this gene yields a polypeptide that confers hygromycin B resistance for positive selection in vitro, and ganciclovir sensitivity for negative selection in vivo. See Lupton S. D., et al, Mol. and Cell. Biology 1 1:3374-3378, 1991. In addition, in embodiments, the polynucleotides encoding the chimeric receptors are in retroviral vectors containing the fused gene, particularly those that confer hygromycin B resistance for positive selection in vitro, and ganciclovir sensitivity for negative selection in vivo, for example the HyTK retroviral vector described in Lupton, S. D. et al. (1991), supra. See also the publications of PCT U591/08442 and PCT/US94/05601, describing the use of bifunctional selectable fusion genes derived from fusing dominant positive selectable markers with negative selectable markers.

[0333] Suitable positive selectable markers can be derived from genes selected from the group consisting of hph, nco, and gpt, and suitable negative selectable markers can be derived from genes selected from the group consisting of cytosine deaminase, HSV-I TK, VZV TK, HPRT, APRT and gpt. Other suitable markers are bifunctional selectable fusion genes wherein the positive selectable marker is derived from hph or neo, and the negative selectable marker is derived from cytosine deaminase or a TK gene or selectable marker.

viii) Strategies for Regulating Lentiviral Integration

[0334] Retroviral and lentiviral nucleic acids are disclosed which are lacking or disabled in key proteins/sequences so as to prevent integration of the retroviral or lentiviral genome into the target cell genome. For instance, viral nucleic acids lacking each of the amino acids making up the highly conserved DDE motif (Engelman and Craigie (1992) J. Virol. 66:6361-6369; Johnson et al. (1986) Proc. Natl. Acad. Sci. USA 83:7648-7652; Khan et al. (1991) Nucleic Acids Res. 19:851-860) of retroviral integrase enables the production of integration defective retroviral nucleic acids.

[0335] For instance, in some embodiments, a retroviral nucleic acid herein comprises a lentiviral integrase comprising a mutation that causes said integrase to be unable to catalyze the integration of the viral genome into a cell genome. In some embodiments, said mutations are type I mutations which affect directly the integration, or type II mutations which trigger pleiotropic defects affecting virion morphogenesis and/or reverse transcription. Illustrative non-limitative examples of type I mutations are those mutations affecting any of the three residues that participate in the catalytic core domain of the integrase: DX39_58 DX35E (D64, D116 and E152 residues of the integrase of the HIV-1). In a particular embodiment, the mutation that causes said integrase to be unable to catalyze the integration of the viral genome into a cell genome is the substitution of one or more amino acid residues of the DDE motif of the catalytic core domain of the integrase, preferably the substitution of the first aspartic residue of said DEE motif by an asparagine residue. In some embodiment the retroviral vector does not comprise an integrase protein.

[0336] In some embodiments the retrovirus integrates into active transcription units. In some embodiments the retrovirus does not integrate near transcriptional start sites, the 5′ end of genes, or DNAse1 cleavage sites. In some embodiments the retrovirus integration does not active proto-oncogenes or inactive tumor suppressor genes. In some embodiments the retrovirus is not genotoxic. In some embodiments the lentivirus integrates into introns.

[0337] In some embodiments, the retroviral nucleic acid integrates into the genome of a target cell with a particular copy number. The average copy number may be determined from single cells, a population of cells, or individual cell colonies. Exemplary methods for determining copy number include polymerase chain reaction (PCR) and flow cytometry.

[0338] In some embodiments DNA encoding the exogenous agent is integrated into the genome. In some embodiments DNA encoding the exogenous agent is maintained episomally. In some embodiments the ratio of integrated to episomal DNA encoding the exogenous agent is at least 0.01, 0.1, 0.5, 1.0, 2, 5, 10, 100.

[0339] In some embodiments DNA encoding the exogenous agent is linear. In some embodiments DNA encoding the exogenous agent is circular. In some embodiments the ratio of linear to circular copies of DNA encoding the exogenous agent is at least 0.01, 0.1, 0.5, 1.0, 2, 5, 10, 100.

[0340] In embodiments the DNA encoding the exogenous agent is circular with 1 LTR. In some embodiments the DNA encoding the exogenous agent is circular with 2 LTRs. In some embodiments the ratio of circular, 1 LTR-comprising DNA encoding the exogenous agent to circular, 2 LTR-comprising DNA encoding the exogenous agent is at least 0.1, 0.5, 1.0, 2, 5, 10, 20, 50, 100.

### ix) Maintenance of an Episomal Virus

[0341] In retroviruses deficient in integration, circular cDNA off-products of the retrotranscription (e.g., 1-LTR and 2-LTR) can accumulate in the cell nucleus without integrating into the host genome (see Yáñez-Muñoz R J et al., Nat. Med. 2006, 12: 348-353). Like other exogenous DNA those intermediates can then integrate in the cellular DNA at equal frequencies (e.g., 10³ to 10⁵/cell).

[0342] In some embodiments, episomal retroviral nucleic acid does not replicate. Episomal virus DNA can be modified to be maintained in replicating cells through the inclusion of eukaryotic origin of replication and a scaffold/matrix attachment region (S/MAR) for association with the nuclear matrix.

[0343] Thus, in some embodiments, a retroviral nucleic acid described herein comprises a eukaryotic origin of replication or a variant thereof. Examples of eukaryotic origins of replication of interest are the origin of replication of the β-globin gene as have been described by Aladjem et al (Science, 1995, 270: 815-819), a consensus sequence from autonomously replicating sequences associated with alpha-satellite sequences isolated previously from monkey CV-1 cells and human skin fibroblasts as has been described by Price et al Journal of Biological Chemistry, 2003, 278 (22): 19649-59, the origin of replication of the human c-myc promoter region has have been described by McWinney and Leffak (McWinney C. and Leffak M., Nucleic Acid Research 1990, 18(5): 1233-42). In embodiments, the variant substantially maintains the ability to initiate the replication in eukaryotes. The ability of a particular sequence of initiating replication can be determined by any suitable method, for example, the autonomous replication assay based on bromodeoxyuridine incorporation and density shift (Araujo F. D. et al., supra; Frappier L. et al., supra).

[0344] In some embodiments, the retroviral nucleic acid comprises a scaffold/matrix attachment region (S/MAR) or variant thereof, e.g., a non-consensus-like AT-rich DNA element several hundred base pairs in length, which organizes the nuclear DNA of the eukaryotic genome into chromatin domains, by periodic attachment to the protein scaffold or matrix of the cell nucleus. They are typically found in non-coding regions such as flanking regions, chromatin border regions, and introns. Examples of S/MAR regions are 1.8 kbp S/MAR of the human IFN-γ gene (hIFN-γ^{large}) as described by Bode et al (Bode J. et al., Science, 1992, 255: 195-7), the 0.7 Kbp minimal region of the S/MAR of the human IFN-γ gene (hIFN-γ^{short}) as has have been described by Ramezani (Ramezani A. et al., Blood 2003, 101: 4717-24), the 0.2 Kbp minimal region of the S/MAR of the human dehydrofolate reductase gene (hDHFR) as has been described by Mesner L. D. et al., Proc Natl Acad Sci USA, 2003, 100: 3281-86). In embodiments, the functionally equivalent variant of the S/MAR is a sequence selected based on the set six rules that together or alone have been suggested to contribute to S/MAR function (Kramer et al (1996) Genomics 33, 305; Singh et al (1997) Nucl. Acids Res 25, 1419). These rules have been merged into the MAR-Wiz computer program freely available at genomecluster.secs.oakland.edu/MAR-Wiz. In embodiments, the variant substantially maintains the same functions of the S/MAR from which it derives, in particular, the ability to specifically bind to the nuclear the matrix. The skilled person can determine if a particular variant is able to specifically bind to the nuclear matrix, for example by the in vitro or in vivo MAR assays described by Mesner et al. (Mesner L. D. et al, supra). In some embodiments, a specific sequence is a variant of a S/MAR if the particular variant shows propensity for DNA strand separation. This property can be determined using a specific program based on methods from equilibrium statistical mechanics. The stress-induced duplex destabilization (SIDD) analysis technique “[ . . . ] calculates the extent to which the imposed level of superhelical stress decreases the free energy needed to open the duplex at each position along a DNA sequence. The results are displayed as an SIDD profile, in which sites of strong destabilization appear as deep minima [ . . . ]” as defined in Bode et al (2005) J. Mol. Biol. 358,597. The SIDD algorithm and the mathematical basis (Bi and Benham (2004) Bioinformatics 20, 1477) and the analysis of the SIDD profile can be performed using the freely available internet resource at WebSIDD (www.genomecenter.ucdavis.edu/benham). Accordingly, in some embodiment, the polynucleotide is considered a variant of the S/MAR sequence if it shows a similar SIDD profile as the S/MAR.

### B. Cell-Derived Fusosomes

[0345] Compositions of fusosomes may be generated from cells in culture, for example cultured mammalian cells, e.g., cultured human cells. The cells may be progenitor cells or non-progenitor (e.g., differentiated) cells. The cells may be primary cells or cell lines (e.g., a mammalian, e.g., human, cell line described herein). In embodiments, the cultured cells are progenitor cells, e.g., bone marrow stromal cells, marrow derived adult progenitor cells (MAPCs), endothelial progenitor cells (EPC), blast cells, intermediate progenitor cells formed in the subventricular zone, neural stem cells, muscle stem cells, satellite cells, liver stem cells, hematopoietic stem cells, bone marrow stromal cells, epidermal stem cells, embryonic stem cells, mesenchymal stem cells, umbilical cord stem cells, precursor cells, muscle precursor cells, myoblast, cardiomyoblast, neural precursor cells, glial precursor cells, neuronal precursor cells, hepatoblasts.

[0346] In some embodiments, the source cell is an endothelial cell, a fibroblast, a blood cell (e.g., a macrophage, a neutrophil, a granulocyte, a leukocyte), a stem cell (e.g., a mesenchymal stem cell, an umbilical cord stem cell, bone marrow stem cell, a hematopoietic stem cell, an induced pluripotent stem cell e.g., an induced pluripotent stem cell derived from a subject's cells), an embryonic stem cell (e.g., a stem cell from embryonic yolk sac, placenta, umbilical cord, fetal skin, adolescent skin, blood, bone marrow, adipose tissue, erythropoietic tissue, hematopoietic tissue), a myoblast, a parenchymal cell (e.g., hepatocyte), an alveolar cell, a neuron (e.g., a retinal neuronal cell) a precursor cell (e.g., a retinal precursor cell, a myeloblast, myeloid precursor cells, a thymocyte, a meiocyte, a megakaryoblast, a promegakaryoblast, a melanoblast, a lymphoblast, a bone marrow precursor cell, a normoblast, or an angioblast), a progenitor cell (e.g., a cardiac progenitor cell, a satellite cell, a radial glial cell, a bone marrow stromal cell, a pancreatic progenitor cell, an endothelial progenitor cell, a blast cell), or an immortalized cell (e.g., HeLa, HEK293, HFF-1, MRC-5, WI-38, IMR 90, IMR 91, PER.C6, HT-1080, or BJ cell).

[0347] The cultured cells may be from epithelial, connective, muscular, or nervous tissue or cells, and combinations thereof. Fusosome can be generated from cultured cells from any eukaryotic (e.g., mammalian) organ system, for example, from the cardiovascular system (heart, vasculature); digestive system (esophagus, stomach, liver, gallbladder, pancreas, intestines, colon, rectum and anus); endocrine system (hypothalamus, pituitary gland, pineal body or pineal gland, thyroid, parathyroids, adrenal glands); excretory system (kidneys, ureters, bladder); lymphatic system (lymph, lymph nodes, lymph vessels, tonsils, adenoids, thymus, spleen); integumentary system (skin, hair, nails); muscular system (e.g., skeletal muscle); nervous system (brain, spinal cord, nerves); reproductive system (ovaries, uterus, mammary glands, testes, vas deferens, seminal vesicles, prostate); respiratory system (pharynx, larynx, trachea, bronchi, lungs, diaphragm); skeletal system (bone, cartilage), and combinations thereof. In embodiments, the cells are from a highly mitotic tissue (e.g., a highly mitotic healthy tissue, such as epithelium, embryonic tissue, bone marrow, intestinal crypts). In embodiments, the tissue sample is a highly metabolic tissue (e.g., skeletal tissue, neural tissue, cardiomyocytes).

[0348] In some embodiments, the cells are from a young donor, e.g., a donor 25 years, 20 years, 18 years, 16 years, 12 years, 10 years, 8 years of age, 5 years of age, 1 year of age, or less. In some embodiments, the cells are from fetal tissue.

[0349] In some embodiments, the cells are derived from a subject and administered to the same subject or a subject with a similar genetic signature (e.g., MHC-matched).

[0350] In certain embodiments, the cells have telomeres of average size greater than 3000, 4000, 5000, 6000, 7000, 8000, 9000, or 10000 nucleotides in length (e.g., between 4,000-10,000 nucleotides in length, between 6,000-10,000 nucleotides in length).

[0351] In some embodiments, fusosomes are generated from a cell clone identified, chosen, or selected based on a desirable phenotype or genotype for use as a source for fusosome composition described herein. For example, a cell clone is identified, chosen, or selected based on low mitochondrial mutation load, long telomere length, differentiation state, or a particular genetic signature (e.g., a genetic signature to match a recipient).

[0352] A fusosome composition described herein may be comprised of fusosomes from one cellular or tissue source, or from a combination of sources. For example, a fusosome composition may comprise fusosomes from xenogeneic sources (e.g., animals, tissue culture of the aforementioned species' cells), allogeneic, autologous, from specific tissues resulting in different protein concentrations and distributions (liver, skeletal, neural, adipose, etc.), from cells of different metabolic states (e.g., glycolytic, respiring). A composition may also comprise fusosomes in different metabolic states, e.g. coupled or uncoupled, as described elsewhere herein.

[0353] In some embodiments, fusosomes are generated from source cells expressing a fusogen, e.g., a fusogen described herein. In some embodiments, the fusogen is disposed in a membrane of the source cell, e.g., a lipid bilayer membrane, e.g., a cell surface membrane, or a subcellular membrane (e.g., lysosomal membrane). In some embodiments, fusosomes are generated from source cells with a fusogen disposed in a cell surface membrane.

[0354] In some embodiments, fusosomes are generated by inducing budding of an exosome, microvesicle, membrane vesicle, extracellular membrane vesicle, plasma membrane vesicle, giant plasma membrane vesicle, apoptotic body, mitoparticle, pyrenocyte, lysosome, or other membrane enclosed vesicle.

[0355] In some embodiments, fusosomes are generated by inducing cell enucleation. Enucleation may be performed using assays such as genetic, chemical (e.g., using Actinomycin D, see Bayona-Bafaluy et al., “A chemical enucleation method for the transfer of mitochondrial DNA to ρ° cells” Nucleic Acids Res. 2003 Aug. 15; 31(16): e98), mechanical methods (e.g., squeezing or aspiration, see Lee et al., “A comparative study on the efficiency of two enucleation methods in pig somatic cell nuclear transfer: effects of the squeezing and the aspiration methods.” Anim Biotechnol. 2008; 19(2):71-9), or combinations thereof. Enucleation refers not only to a complete removal of the nucleus but also the displacement of the nucleus from its typical location such that the cell contains the nucleus but it is non-functional.

[0356] In embodiments, making a fusosome comprises producing cell ghosts, giant plasma membrane vesicle, or apoptotic bodies. In embodiments, a fusosome composition comprises one or more of cell ghosts, giant plasma membrane vesicle, and apoptotic bodies.

[0357] In some embodiments, fusosomes are generated by inducing cell fragmentation. In some embodiments, cell fragmentation can be performed using the following methods, including, but not limited to: chemical methods, mechanical methods (e.g., centrifugation (e.g., ultracentrifugation, or density centrifugation), freeze-thaw, or sonication), or combinations thereof.

[0358] In some embodiments, a fusosome can be generated from a source cell expressing a fusogen, e.g., as described herein, by any one, all of, or a combination of the following methods:

i) inducing budding of a mitoparticle, exosome, or other membrane enclosed vesicle;
ii) inducing nuclear inactivation, e.g., enucleation, by any of the following methods or a combination thereof:

[0359] a) a genetic method;

[0360] b) a chemical method, e.g., using Actinomycin D; or

[0361] c) a mechanical method, e.g., squeezing or aspiration; or

iii) inducing cell fragmentation, e.g., by any of the following methods or a combination thereof:

[0362] a) a chemical method;

[0363] b) a mechanical method, e.g., centrifugation (e.g., ultracentrifugation or density centrifugation); freeze thaw; or sonication.

[0364] i) Modifications to Cells Prior to Fusosome Generation

[0365] In some aspects, a modification is made to a cell, such as modification of a subject, tissue or cell, prior to fusosome generation. Such modifications can be effective to, e.g., improve fusion, fusogen expression or activity, structure or function of the cargo, or structure or function of the target cell.

[0366] a) Physical Modifications

[0367] In some embodiments, a cell is physically modified prior to generating the fusosome. For example, as described elsewhere herein, a fusogen may be linked to the surface of the cell.

[0368] In some embodiments, a cell is treated with a chemical agent prior to generating the fusosome. For example, the cell may be treated with a chemical or lipid fusogen, such that the chemical or lipid fusogen non-covalently or covalently interacts with the surface of the cell or embeds within the surface of the cell. In some embodiments, the cell is treated with an agent to enhance fusogenic properties of the lipids in the cell membrane.

[0369] In some embodiments, the cell is physically modified prior to generating the fusosome with one or more covalent or non-covalent attachment sites for synthetic or endogenous small molecules or lipids on the cell surface that enhance targeting of the fusosome to an organ, tissues, or cell-type.

[0370] In embodiments, a fusosome comprises increased or decreased levels of an endogenous molecule. For instance, the fusosome may comprise an endogenous molecule that also naturally occurs in the naturally occurring source cell but at a higher or lower level than in the fusosome. In some embodiments, the polypeptide is expressed from an exogenous nucleic acid in the source cell or fusosome. In some embodiments, the polypeptide is isolated from a source and loaded into or conjugated to a source cell or fusosome.

[0371] In some embodiments, a cell is treated with a chemical agent, e.g., small molecule, prior to generating the fusosome to increase the expression or activity of an endogenous fusogen in the cell (e.g., in some embodiments, endogenous relative to the source cell, and in some embodiments, endogenous relative to the target cell). In some embodiments, a small molecule may increase expression or activity of a transcriptional activator of the endogenous fusogen. In some embodiments, a small molecule may decrease expression or activity of a transcriptional repressor of the endogenous fusogen. In some embodiments, a small molecule is an epigenetic modifier that increases expression of the endogenous fusogen.

[0372] In some embodiments, fusosomes are generated from cells treated with fusion arresting compounds, e.g., lysophosphatidylcholine. In some embodiments, fusosomes are generated from cells treated with dissociation reagents that do not cleave fusogens, e.g., Accutase.

[0373] In some embodiments, a source cell is physically modified with, e.g., CRISPR activators, prior to generating a fusosome to add or increase the concentration of fusogens.

[0374] In some embodiments, the cell is physically modified to increase or decrease the quantity, or enhance the structure or function of organelles, e.g., mitochondria, Golgi apparatus, endoplasmic reticulum, intracellular vesicles (such as lysosomes, autophagosomes).

[0375] b) Genetic Modifications

[0376] In some embodiments, a cell is genetically modified prior to generating the fusosome to increase the expression of an endogenous fusogen in the cell (e.g., in some embodiments, endogenous relative to the source cell, and in some embodiments, endogenous relative to the target cell. In some embodiments, a genetic modification may increase expression or activity of a transcriptional activator of the endogenous fusogen. In some embodiments, a genetic modification may decrease expression or activity of a transcriptional repressor of the endogenous fusogen. In some embodiments the activator or repressor is a nuclease-inactive cas9 (dCas9) linked to a transcriptional activator or repressor that is targeted to the endogenous fusogen by a guide RNA. In some embodiments, a genetic modification epigenetically modifies an endogenous fusogen gene to increase its expression. In some embodiments the epigenetic activator a nuclease-inactive cas9 (dCas9) linked to an epigenetic modifier that is targeted to the endogenous fusogen by a guide RNA.

[0377] In some embodiments, a cell is genetically modified prior to generating the fusosome to increase the expression of an exogenous fusogen in the cell, e.g., delivery of a transgene. In some embodiments, a nucleic acid, e.g., DNA, mRNA or siRNA, is transferred to the cell prior to generating the fusosome, e.g., to increase or decrease the expression of a cell surface molecule (protein, glycan, lipid or low molecular weight molecule) used for organ, tissue, or cell targeting. In some embodiments, the nucleic acid targets a repressor of a fusogen, e.g., an shRNA, siRNA construct. In some embodiments, the nucleic acid encodes an inhibitor of a fusogen repressor.

[0378] In some embodiments, the method comprises introducing a nucleic acid, that is exogenous relative to the source cell encoding a fusogen into a source cell. The exogenous nucleic acid may be, e.g., DNA or RNA. In some embodiments the exogenous nucleic acid may be e.g., a DNA, a gDNA, a cDNA, an RNA, a pre-mRNA, an mRNA, an miRNA, an siRNA, etc.

[0379] In some embodiments, the exogenous DNA may be linear DNA, circular DNA, or an artificial chromosome. In some embodiments the DNA is maintained episomally. In some embodiments the DNA is integrated into the genome. The exogenous RNA may be chemically modified RNA, e.g., may comprise one or more backbone modification, sugar modifications, noncanonical bases, or caps. Backbone modifications include, e.g., phosphorothioate, N3′ phosphoramidite, boranophosphate, phosphonoacetate, thio-PACE, morpholino phosphoramidites, or PNA. Sugar modifications include, e.g., 2′-O-Me, 2′F, 2′F-ANA, LNA, UNA, and 2′-O-MOE. Noncanonical bases include, e.g., 5-bromo-U, and 5-iodo-U, 2,6-diaminopurine, C-5 propynyl pyrimidine, difluorotoluene, difluorobenzene, dichlorobenzene, 2-thiouridine, pseudouridine, and dihydrouridine. Caps include, e.g., ARCA. Additional modifications are discussed, e.g., in Deleavey et al., “Designing Chemically Modified Oligonucleotides for Targeted Gene Silencing” Chemistry & Biology Volume 19, Issue 8, 24 Aug. 2012, Pages 937-954, which is herein incorporated by reference in its entirety.

[0380] In some embodiments, a cell is treated with a chemical agent, e.g. a small molecule, prior to generating the fusosome to increase the expression or activity of a fusogen that is exogenous relative to the source cell in the cell. In some embodiments, a small molecule may increase expression or activity of a transcriptional activator of the exogenous fusogen. In some embodiments, a small molecule may decrease expression or activity of a transcriptional repressor of the exogenous fusogen. In some embodiments, a small molecule is an epigenetic modifier that increases expression of the exogenous fusogen.

[0381] In some embodiments, the nucleic acid encodes a modified fusogen. For example, a fusogen that has regulatable fusogenic activity, e.g., specific cell-type, tissue-type or local microenvironment activity. Such regulatable fusogenic activity may include, activation and/or initiation of fusogenic activity by low pH, high pH, heat, infrared light, extracellular enzyme activity (eukaryotic or prokaryotic), or exposure of a small molecule, a protein, or a lipid. In some embodiments, the small molecule, protein, or lipid is displayed on a target cell.

[0382] In some embodiments, a cell is genetically modified prior to generating the fusosome to alter (i.e., upregulate or downregulate) the expression of signaling pathways (e.g., the Wnt/Beta-catenin pathway). In some embodiments, a cell is genetically modified prior to generating the fusosome to alter (e.g., upregulate or downregulate) the expression of a gene or genes of interest. In some embodiments, a cell is genetically modified prior to generating the fusosome to alter (e.g., upregulate or downregulate) the expression of a nucleic acid (e.g. a miRNA or mRNA) or nucleic acids of interest. In some embodiments, nucleic acids, e.g., DNA, mRNA or siRNA, are transferred to the cell prior to generating the fusosome, e.g., to increase or decrease the expression of signaling pathways, genes, or nucleic acids. In some embodiments, the nucleic acid targets a repressor of a signaling pathway, gene, or nucleic acid, or represses a signaling pathway, gene, or nucleic acid. In some embodiments, the nucleic acid encodes a transcription factor that upregulates or downregulates a signaling pathway, gene, or nucleic acid. In some embodiments the activator or repressor is a nuclease-inactive cas9 (dCas9) linked to a transcriptional activator or repressor that is targeted to the signaling pathway, gene, or nucleic acid by a guide RNA. In some embodiments, a genetic modification epigenetically modifies an endogenous signaling pathway, gene, or nucleic acid to its expression. In some embodiments the epigenetic activator a nuclease-inactive cas9 (dCas9) linked to a epigenetic modifier that is targeted to the signaling pathway, gene, or nucleic acid by a guide RNA. In some embodiments, a cell's DNA is edited prior to generating the fusosome to alter (e.g., upregulate or downregulate) the expression of signaling pathways (e.g. the Wnt/Beta-catenin pathway), gene, or nucleic acid. In some embodiments, the DNA is edited using a guide RNA and CRISPR-Cas9/Cpf1 or other gene editing technology.

[0383] A cell may be genetically modified using recombinant methods. A nucleic acid sequence coding for a desired gene can be obtained using recombinant methods, such as, for example by screening libraries from cells expressing the gene, by deriving the gene from a vector known to include the same, or by isolating directly from cells and tissues containing the same, using standard techniques. Alternatively, a gene of interest can be produced synthetically, rather than cloned.

[0384] Expression of natural or synthetic nucleic acids is typically achieved by operably linking a nucleic acid encoding the gene of interest to a promoter, and incorporating the construct into an expression vector. The vectors can be suitable for replication and integration in eukaryotes. Typical cloning vectors contain transcription and translation terminators, initiation sequences, and promoters useful for expression of the desired nucleic acid sequence.

[0385] In some embodiments, a cell may be genetically modified with one or more expression regions, e.g., a gene. In some embodiments, the cell may be genetically modified with an exogenous gene (e.g., capable of expressing an exogenous gene product such as an RNA or a polypeptide product) and/or an exogenous regulatory nucleic acid. In some embodiments, the cell may be genetically modified with an exogenous sequence encoding a gene product that is endogenous to a target cell and/or an exogenous regulatory nucleic acid capable of modulating expression of an endogenous gene. In some embodiments, the cell may be genetically modified with an exogenous gene and/or a regulatory nucleic acid that modulates expression of an exogenous gene. In some embodiments, the cell may be genetically modified with an exogenous gene and/or a regulatory nucleic acid that modulates expression of an endogenous gene. It will be understood by one of skill in the art that the cell described herein may be genetically modified to express a variety of exogenous genes that encode proteins or regulatory molecules, which may, e.g., act on a gene product of the endogenous or exogenous genome of a target cell. In some embodiments, such genes confer characteristics to the fusosome, e.g., modulate fusion with a target cell. In some embodiments, the cell may be genetically modified to express an endogenous gene and/or regulatory nucleic acid. In some embodiments, the endogenous gene or regulatory nucleic acid modulates the expression of other endogenous genes. In some embodiments, the cell may be genetically modified to express an endogenous gene and/or regulatory nucleic acid which is expressed differently (e.g., inducibly, tissue-specifically, constitutively, or at a higher or lower level) than a version of the endogenous gene and/or regulatory nucleic acid on other chromosomes.

[0386] The promoter elements, e.g., enhancers, regulate the frequency of transcriptional initiation. Typically, these are located in the region 30-110 bp upstream of the start site, although a number of promoters have recently been shown to contain functional elements downstream of the start site as well. The spacing between promoter elements frequently is flexible, so that promoter function is preserved when elements are inverted or moved relative to one another. In the thymidine kinase (tk) promoter, the spacing between promoter elements can be increased to 50 bp apart before activity begins to decline. Depending on the promoter, it appears that individual elements can function either cooperatively or independently to activate transcription.

[0387] One example of a suitable promoter is the immediate early cytomegalovirus (CMV) promoter sequence. This promoter sequence is a strong constitutive promoter sequence capable of driving high levels of expression of any polynucleotide sequence operatively linked thereto. Another example of a suitable promoter is Elongation Growth Factor-1a (EF-1a). However, other constitutive promoter sequences may also be used, including, but not limited to the simian virus 40 (SV40) early promoter, mouse mammary tumor virus (MMTV), human immunodeficiency virus (HIV) long terminal repeat (LTR) promoter, MoMuLV promoter, an avian leukemia virus promoter, an Epstein-Barr virus immediate early promoter, a Rous sarcoma virus promoter, as well as human gene promoters such as, but not limited to, the actin promoter, the myosin promoter, the hemoglobin promoter, and the creatine kinase promoter.

[0388] Further, the invention should not be limited to the use of constitutive promoters. Inducible promoters are also contemplated as part of the invention. The use of an inducible promoter provides a molecular switch capable of turning on expression of the polynucleotide sequence which it is operatively linked when such expression is desired, or turning off the expression when expression is not desired. Examples of inducible promoters include, but are not limited to a tissue-specific promoter, metallothionine promoter, a glucocorticoid promoter, a progesterone promoter, and a tetracycline promoter. In some embodiments, expression of a fusogen is upregulated before fusosomes are generated, e.g., 3, 6, 9, 12, 24, 26, 48, 60, or 72 hours before fusosomes are generated.

[0389] The expression vector to be introduced into the source can also contain either a selectable marker gene or a reporter gene or both to facilitate identification and selection of expressing cells from the population of cells sought to be transfected or infected through viral vectors. In other aspects, the selectable marker may be carried on a separate piece of DNA and used in a co-transfection procedure. Both selectable markers and reporter genes may be flanked with appropriate regulatory sequences to enable expression in the host cells. Useful selectable markers include, for example, antibiotic-resistance genes, such as neo and the like.

[0390] Reporter genes may be used for identifying potentially transfected cells and for evaluating the functionality of regulatory sequences. In general, a reporter gene is a gene that is not present in or expressed by the recipient source and that encodes a polypeptide whose expression is manifested by some easily detectable property, e.g., enzymatic activity. Expression of the reporter gene is assayed at a suitable time after the DNA has been introduced into the recipient cells. Suitable reporter genes may include genes encoding luciferase, beta-galactosidase, chloramphenicol acetyl transferase, secreted alkaline phosphatase, or the green fluorescent protein gene (e.g., Ui-Tei et al., 2000 FEBS Letters 479: 79-82). Suitable expression systems are well known and may be prepared using known techniques or obtained commercially. In general, the construct with the minimal 5′ flanking region showing the highest level of expression of reporter gene is identified as the promoter. Such promoter regions may be linked to a reporter gene and used to evaluate agents for the ability to modulate promoter-driven transcription.

[0391] In some embodiments, a cell may be genetically modified to alter expression of one or more proteins. Expression of the one or more proteins may be modified for a specific time, e.g., development or differentiation state of the source. In some embodiments, fusosomes are generated from a source of cells genetically modified to alter expression of one or more proteins, e.g., fusogen proteins or non-fusogen proteins that affect fusion activity, structure or function. Expression of the one or more proteins may be restricted to a specific location(s) or widespread throughout the source.

[0392] In some embodiments, the expression of a fusogen protein is modified. In some embodiments, fusosomes are generated from cells with modified expression of a fusogen protein, e.g., an increase or a decrease in expression of a fusogen by at least 10%, 15%, 20%, 30%, 40%, 50%, 60%, 75%, 80%, 90% or more.

[0393] In some embodiments, cells may be engineered to express a cytosolic enzyme (e.g., proteases, phosphatases, kinases, demethylases, methyltransferases, acetylases) that targets a fusogen protein. In some embodiments, the cytosolic enzyme affects one or more fusogens by altering post-translational modifications. Post-translational protein modifications of proteins may affect responsiveness to nutrient availability and redox conditions, and protein—protein interactions. In some embodiments, a fusosome comprises fusogens with altered post-translational modifications, e.g., an increase or a decrease in post-translational modifications by at least 10%, 15%, 20%, 30%, 40%, 50%, 60%, 75%, 80%, 90% or more.

[0394] Methods of introducing a modification into a cell include physical, biological and chemical methods. See, for example, Geng. & Lu, Microfluidic electroporation for cellular analysis and delivery. Lab on a Chip. 13(19):3803-21. 2013; Sharei, A. et al. A vector-free microfluidic platform for intracellular delivery. PNAS vol. 110 no. 6. 2013; Yin, H. et al., Non-viral vectors for gene-based therapy. Nature Reviews Genetics. 15: 541-555. 2014. Suitable methods for modifying a cell for use in generating the fusosomes described herein include, for example, diffusion, osmosis, osmotic pulsing, osmotic shock, hypotonic lysis, hypotonic dialysis, ionophoresis, electroporation, sonication, microinjection, calcium precipitation, membrane intercalation, lipid mediated transfection, detergent treatment, viral infection, receptor mediated endocytosis, use of protein transduction domains, particle firing, membrane fusion, freeze-thawing, mechanical disruption, and filtration.

[0395] Confirming the presence of a genetic modification includes a variety of assays. Such assays include, for example, molecular biological assays, such as Southern and Northern blotting, RT-PCR and PCR; biochemical assays, such as detecting the presence or absence of a particular peptide, e.g., by immunological means (ELISAs and Western blots) or by assays described herein.

[0396] The present disclosure provides, in some aspects, a fusosome comprising: (a) a lipid bilayer, (b) a lumen (e.g., comprising cytosol) surrounded by the lipid bilayer; (c) an exogenous or overexpressed fusogen, e.g., wherein the fusogen is disposed in the lipid bilayer, wherein the fusosome is derived from a source cell; and wherein the fusosome has partial or complete nuclear inactivation (e.g., nuclear removal).

[0397] The present disclosure provides, in some aspects, a fusosome composition comprising a plurality of fusosomes derived from a source cell, wherein the fusosomes of the plurality comprise:(a) a lipid bilayer, (b) a lumen comprising cytosol, wherein the lumen is surrounded by the lipid bilayer; (c) an exogenous or overexpressed fusogen disposed in the lipid bilayer, (d) a nucleic acid, e.g., a nucleic acid comprising a payload gene; and wherein the fusosome does not comprise a nucleus; wherein the amount of viral capsid protein in the fusosome composition is less than 1% of total protein; wherein: (i) when the plurality of fusosomes are contacted with a cell population comprising target cells and non-target cells, the cargo is present in at least 10-fold more target cells than non-target cells or reference cells, or (ii) the fusosomes of the plurality fuse at a higher rate with a target cell than with a non-target cell or reference cell by at least at least 50%; wherein the target cell is chosen from a myeloid-lymphoid balanced HSC, a myeloid-biased HSC, a lymphoid-biased HSC, a platelet-biased HSC, a platelet-myeloid-biased HSC, a long-term repopulating HSC, an intermediate-term repopulating HSC, or a short-term repopulating HSC.

[0398] The present disclosure provides, in some aspects, a fusosome composition comprising a plurality of fusosomes derived from a source cell, wherein the fusosomes of the plurality comprise: (a) a lipid bilayer, (b) a lumen comprising cytosol, wherein the lumen is surrounded by the lipid bilayer; (c) an exogenous or overexpressed fusogen disposed in the lipid bilayer, (d) a nucleic acid comprising a payload gene encoding an exogenous agent of Table 5 or Table 6, wherein the fusosome does not comprise a nucleus; and wherein the amount of viral capsid protein in the fusosome composition is less than 1% of total protein.

[0399] The present disclosure provides, in some aspects, a fusosome composition comprising a plurality of fusosomes derived from a source cell, wherein the fusosomes of the plurality comprise: (a) a lipid bilayer, (b) a lumen comprising cytosol, wherein the lumen is surrounded by the lipid bilayer; (c) an exogenous or overexpressed fusogen disposed in the lipid bilayer, (d) a nucleic acid comprising a payload gene, wherein the nucleic acid comprises a NTCSRE operably linked to the payload gene, wherein the NTCSRE comprises a non-HSC-specific miRNA recognition sequence, e.g., a non-HSC-specific miRNA recognition sequence bound by a miRNA present in a non-target cell (e.g., a plasmacytoid dendritic cell, a myeloid cell, a T cell progenitor, an activated T cell, an activated dendritic cell, or a mature lymphocyte) at a higher level than in a HSC, e.g., a non-HSC-specific miRNA recognition sequence bound by a miRNA of Table 4; and wherein the fusosome does not comprise a nucleus; and wherein the amount of viral capsid protein in the fusosome composition is less than 1% of total protein.

[0400] In some embodiments, the miRNA is present in a non-target cell (e.g., a plasmacytoid dendritic cell, a myeloid cell, a T cell progenitor, an activated T cell, an activated dendritic cell, or a mature lymphocyte) at a level at least 10, 100, 1,000, or 10,000 times higher than the level of the miRNA present in the target cell (e.g., a HSC). In some embodiments, the miRNA is not detectably present in a target cell (e.g., a HSC, e.g., a HSC described herein). In some embodiments, the miRNA is not present in the target cell (e.g., a HSC).

[0401] The present disclosure provides, in some aspects, a fusosome composition comprising a plurality of fusosomes derived from a source cell, wherein the fusosomes of the plurality comprise: (a) a lipid bilayer, (b) a lumen comprising cytosol, wherein the lumen is surrounded by the lipid bilayer; (c) an exogenous or overexpressed fusogen disposed in the lipid bilayer, (d) a nucleic acid comprising a payload gene, wherein the nucleic acid comprises a promoter operably linked to the payload gene, wherein the promoter is a HSC-specific promoter, e.g., is a promoter specific for a HSC, a myeloid-lymphoid balanced HSC, a myeloid-biased HSC, a lymphoid-biased HSC, a platelet-biased HSC, a platelet-myeloid-biased HSC, a long-term repopulating HSC, an intermediate-term repopulating HSC, or a short-term repopulating HSC; wherein the fusosome does not comprise a nucleus; and wherein the amount of viral capsid protein in the fusosome composition is less than 1% of total protein.

[0402] The present disclosure provides, in some aspects, a fusosome composition comprising a plurality of fusosomes derived from a source cell, wherein the fusosomes of the plurality comprise: (a) a lipid bilayer, (b) a lumen comprising cytosol, wherein the lumen is surrounded by the lipid bilayer; (c) an exogenous or overexpressed fusogen disposed in the lipid bilayer, (d) a nucleic acid comprising a payload gene, wherein the nucleic acid comprises a promoter having sequence of a promoter in Table 3, or a sequence having at least 70%, 75%, 80%, 85%, 90%, 95%, 96%, 97%, 98%, or 99% identity thereto; wherein the fusosome does not comprise a nucleus; and wherein the amount of viral capsid protein in the fusosome composition is less than 1% of total protein;

[0403] The present disclosure provides, in some aspects, a fusosome composition comprising a plurality of fusosomes derived from a source cell, wherein the fusosomes of the plurality comprise: (a) a lipid bilayer, (b) a lumen comprising cytosol, wherein the lumen is surrounded by the lipid bilayer; (c) an exogenous or overexpressed fusogen disposed in the lipid bilayer, (d) a nucleic acid comprising: (i) a payload gene; (ii) a NTCSRE operably linked to the payload gene, e.g., wherein the NTCSRE comprises a non-HSC-specific miRNA recognition sequence, e.g., a non-HSC-specific miRNA recognition sequence bound by a miRNA of Table 4, and (iii) optionally, a positive target cell-specific regulatory element, e.g., a positive HSC-specific regulatory element (e.g., a HSC-specific promoter) operatively linked to the payload gene, wherein the positive HSC-specific regulatory element increases expression of the payload gene in a target cell relative to an otherwise similar fusosome lacking the positive target cell-specific regulatory element; wherein the fusosome does not comprise a nucleus; and wherein the amount of viral capsid protein in the fusosome composition is less than 1% of total protein.

[0404] In some embodiments, one or more of the following is present: i) the fusosome comprises or is comprised by a cytobiologic; ii) the fusosome comprises an enucleated cell; iii) the fusosome comprises an inactivated nucleus; iv) the fusosome fuses at a higher rate with a target cell than with a non-target cell, e.g., by at least at least 1%, 2%, 3%, 4%, 5%, 10%, 20%, 30%, 40%, 50%, 60%, 70%, 80%, 90%, 2-fold, 3-fold, 4-fold, 5-fold, 10-fold, 20-fold, 50-fold, or 100-fold, e.g., in an assay of Example 40; v) the fusosome fuses at a higher rate with a target cell than with other fusosomes, e.g., by at least 10%, 20%, 30%, 40%, 50%, 60%, 70%, 80%, or 90%, 2-fold, 3-fold, 4-fold, 5-fold, 10-fold, 20-fold, 50-fold, or 100-fold, e.g., in an assay of Example 40; vi) the fusosome fuses with target cells at a rate such that an agent in the fusosome is delivered to at least 10%, 20%, 30%, 40%, 50%, 60%, 70%, 80%, or 90%, of target cells after 24, 48, or 72 hours, e.g., in an assay of Example 40; vii) the fusogen is present at a copy number of at least, or no more than, 10, 50, 100, 500, 1,000, 2,000, 5,000, 10,000, 20,000, 50,000, 100,000, 200,000, 500,000, 1,000,000, 5,000,000, 10,000,000, 50,000,000, 100,000,000, 500,000,000, or 1,000,000,000 copies, e.g., as measured by an assay of Example 24; viii) the fusosome comprises a therapeutic agent at a copy number of at least, or no more than, 10, 50, 100, 500, 1,000, 2,000, 5,000, 10,000, 20,000, 50,000, 100,000, 200,000, 500,000, 1,000,000, 5,000,000, 10,000,000, 50,000,000, 100,000,000, 500,000,000, or 1,000,000,000 copies, e.g., as measured by an assay of Example 86; ix) the ratio of the copy number of the fusogen to the copy number of the therapeutic agent is between 1,000,000:1 and 100,000:1, 100,000:1 and 10,000:1, 10,000:1 and 1,000:1, 1,000:1 and 100:1, 100:1 and 50:1, 50:1 and 20:1, 20:1 and 10:1, 10:1 and 5:1, 5:1 and 2:1, 2:1 and 1:1, 1:1 and 1:2, 1:2 and 1:5, 1:5 and 1:10, 1:10 and 1:20, 1:20 and 1:50, 1:50 and 1:100, 1:100 and 1:1,000, 1:1,000 and 1:10,000, 1:10,000 and 1:100,000, or 1:100,000 and 1:1,000,000; x) the fusosome comprises a lipid composition substantially similar to that of the source cell or wherein one or more of CL, Cer, DAG, HexCer, LPA, LPC, LPE, LPG, LPI, LPS, PA, PC, PE, PG, PI, PS, CE, SM and TAG is within 10%, 15%, 20%, 25%, 30%, 35%, 40%, 45%, 50%, 55%, 60%, 65%, 70%, or 75% of the corresponding lipid level in the source cell; xi) the fusosome comprises a proteomic composition similar to that of the source cell, e.g., using an assay of Example 85; xii) the fusosome comprises a ratio of lipids to proteins that is within 10%, 20%, 30%, 40%, or 50% of the corresponding ratio in the source cell, e.g., as measured using an assay of Example 38; xiii) the fusosome comprises a ratio of proteins to nucleic acids (e.g., DNA) that is within 10%, 20%, 30%, 40%, or 50% of the corresponding ratio in the source cell, e.g., as measured using an assay of Example 39; xiv) the fusosome comprises a ratio of lipids to nucleic acids (e.g., DNA) that is within 10%, 20%, 30%, 40%, or 50% of the corresponding ratio in the source cell, e.g., as measured using an assay of Example 89; xv) the fusosome has a half-life in a subject, e.g., in a mouse, that is within 1%, 2%, 3%, 4%, 5%, 10%, 20%, 30%, 40%, 50%, 60%, 70%, 80%, 90%, 100% of the half life of a reference cell, e.g., the source cell, e.g., by an assay of Example 58; xvi) the fusosome transports glucose (e.g., labeled glucose, e.g., 2-NBDG) across a membrane, e.g., by at least 1%, 2%, 3%, 4%, 5%, 10%, 20%, 30%, 40%, 50%, 60%, 70%, 80%, 90%, 100% more (e.g., about 11.6% more) than a negative control, e.g., an otherwise similar fusosome in the absence of glucose, e.g., as measured using an assay of Example 48; xvii) the fusosome comprises esterase activity in the lumen that is within 1%, 2%, 3%, 4%, 5%, 10%, 20%, 30%, 40%, 50%, 60%, 70%, 80%, 90%, or 100% of that of the esterase activity in a reference cell, e.g., the source cell or a mouse embryonic fibroblast, e.g., using an assay of Example 49; xviii) the fusosome comprises a metabolic activity level that is within 1%, 2%, 3%, 4%, 5%, 10%, 20%, 30%, 40%, 50%, 60%, 70%, 80%, 90%, or 100% of the citrate synthase activity in a reference cell, e.g., the source cell, e.g., as described in Example 51; xix) the fusosome comprises a respiration level (e.g., oxygen consumption rate) that is within 1%, 2%, 3%, 4%, 5%, 10%, 20%, 30%, 40%, 50%, 60%, 70%, 80%, 90%, or 100% of the respiration level in a reference cell, e.g., the source cell, e.g., as described in Example 52; xx) the fusosome comprises an Annexin-V staining level of at most 18,000, 17,000, 16,000, 15,000, 14,000, 13,000, 12,000, 11,000, or 10,000 MFI, e.g., using an assay of Example 53, or wherein the fusosome comprises an Annexin-V staining level at least 5%, 10%, 20%, 30%, 40%, or 50% lower than the Annexin-V staining level of an otherwise similar fusosome treated with menadione in the assay of Example 53, or wherein the fusosome comprises an Annexin-V staining level at least 5%, 10%, 20%, 30%, 40%, or 50% lower than the Annexin-V staining level of a macrophage treated with menadione in the assay of Example 53, xxi) the fusosome has a miRNA content level of at least at least 1%, 2%, 3%, 4%, 5%, 10%, 20%, 30%, 40%, 50%, 60%, 70%, 80%, 90%, or greater than that of the source cell, e.g., by an assay of Example 31; xxii) the fusosome has a soluble: non-soluble protein ratio is within 1%, 2%, 3%, 4%, 5%, 10%, 20%, 30%, 40%, 50%, 60%, 70%, 80%, 90%, or greater than that of the source cell, e.g., within 1%-2%, 2%-3%, 3%-4%, 4%-5%, 5%-10%, 10%-20%, 20%-30%, 30%-40%, 40%-50%, 50%-60%, 60%-70%, 70%-80%, or 80%-90% of that of the source cell, e.g., by an assay of Example 36; xxiii) the fusosome has an LPS level less than 5%, 1%, 0.5%, 0.01%, 0.005%, 0.0001%, 0.00001% or less of the LPS content of the source cell, e.g., as measured by mass spectrometry, e.g., in an assay of Example 37; xxiv) the fusosome is capable of signal transduction, e.g., transmitting an extracellular signal, e.g., AKT phosphorylation in response to insulin, or glucose (e.g., labeled glucose, e.g., 2-NBDG) uptake in response to insulin, e.g., by at least 1%, 2%, 3%, 4%, 5%, 10%, 20%, 30%, 40%, 50%, 60%, 70%, 80%, 90%, 100% more than a negative control, e.g., an otherwise similar fusosome in the absence of insulin, e.g., using an assay of Example 47; xxv) the fusosome targets a tissue, e.g., liver, lungs, heart, spleen, pancreas, gastrointestinal tract, kidney, testes, ovaries, brain, reproductive organs, central nervous system, peripheral nervous system, skeletal muscle, endothelium, inner ear, or eye, when administered to a subject, e.g., a mouse, e.g., wherein at least 0.1%, 0.5%, 1%, 1.5%, 2%, 2.5%, 3%, 4%, 5%, 10%, 20%, 30%, 40%, 50%, 60%, 70%, 80%, or 90% of the fusosomes in a population of administered fusosomes are present in the target tissue after 24, 48, or 72 hours, e.g., by an assay of Example 62; xxvi) the fusosome has juxtacrine-signaling level of at least 1%, 2%, 3%, 4%, 5%, 10%, 20%, 30%, 40%, 50%, 60%, 70%, 80%, 90%, or 100% greater than the level of juxtacrine signaling induced by a reference cell, e.g., the source cell or a bone marrow stromal cell (BMSC), e.g., by an assay of Example 54; xxvii) the fusosome has paracrine-signaling level of at least 1%, 2%, 3%, 4%, 5%, 10%, 20%, 30%, 40%, 50%, 60%, 70%, 80%, 90%, 100% greater than the level of paracrine signaling induced by a reference cell, e.g., the source cell or a macrophage, e.g., by an assay of Example 55; xxviii) the fusosome polymerizes actin at a level within 1%, 2%, 3%, 4%, 5%, 10%, 20%, 30%, 40%, 50%, 60%, 70%, 80%, 90%, or 100% compared to the level of polymerized actin in a reference cell, e.g., the source cell or a C2C12 cell, e.g., by the assay of Example 56; xxix) the fusosome has a membrane potential within about 1%, 2%, 3%, 4%, 5%, 10%, 20%, 30%, 40%, 50%, 60%, 70%, 80%, 90%, 100% of the membrane potential of a reference cell, e.g., the source cell or a C2C12 cell, e.g., by an assay of Example 57, or wherein the fusosome has a membrane potential of about −20 to ˜150 mV, −20 to −50 mV, −50 to −100 mV, or −100 to −150 mV; xxx) the fusosome is capable of extravasation from blood vessels, e.g., at a rate at least 1%, 2%, 5%, 10%, 20%, 30%, 40%, 50%, 60%, 70%, 80%, or 90% the rate of extravasation of the source cell or of a cell of the same type as the source cell, e.g., using an assay of Example 42, e.g., wherein the source cell is a neutrophil, lymphocyte, B cell, macrophage, or NK cell; xxxi) the fusosome is capable of crossing a cell membrane, e.g., an endothelial cell membrane or the blood brain barrier; xxxii) the fusosome is capable of secreting a protein, e.g., at a rate at least 1%, 2%, 3%, 4%, 5%, 10%, 20%, 30%, 40%, 50%, 60%, 70%, 80%, 90%, or 100% greater than a reference cell, e.g., a mouse embryonic fibroblast, e.g., using an assay of Example 46; xxxiii) the fusosome meets a pharmaceutical or good manufacturing practices (GMP) standard; xxxiv) the fusosome was made according to good manufacturing practices (GMP); xxxv) the fusosome has a pathogen level below a predetermined reference value, e.g., is substantially free of pathogens; xxxvi) the fusosome has a contaminant level below a predetermined reference value, e.g., is substantially free of contaminants; xxxvii) the fusosome has low immunogenicity, e.g., as described herein; xxxviii) the source cell is selected from a neutrophil, a granulocyte, a mesenchymal stem cell, a bone marrow stem cell, an induced pluripotent stem cell, an embryonic stem cell, a myeloblast, a myoblast, a hepatocyte, or a neuron e.g., retinal neuronal cell; or xxxix) the source cell is other than a 293 cell, HEK cell, human endothelial cell, or a human epithelial cell, monocyte, macrophage, dendritic cell, or stem cell.

[0405] The present disclosure also provides, in some aspects, a fusosome comprising: a) a lipid bilayer and a lumen that is miscible with an aqueous solution, e.g., water, wherein the fusosome is derived from a source cell, b) an exogenous or overexpressed fusogen disposed in the lipid bilayer, and c) an organelle, e.g., a therapeutically effective number of organelles, disposed in the lumen.

[0406] In some embodiments, one or more of the following is present: i) the source cell is selected from an endothelial cell, a macrophage, a neutrophil, a granulocyte, a leukocyte, a stem cell (e.g., a mesenchymal stem cell, a bone marrow stem cell, an induced pluripotent stem cell, an embryonic stem cell), a myeloblast, a myoblast, a hepatocyte, or a neuron e.g., retinal neuronal cell; ii) the organelle is selected from a Golgi apparatus, lysosome, endoplasmic reticulum, mitochondria, vacuole, endosome, acrosome, autophagosome, centriole, glycosome, glyoxysome, hydrogenosome, melanosome, mitosome, cnidocyst, peroxisome, proteasome, vesicle, and stress granule; iii) the fusosome has a size of greater than 5 urn, 10 urn, 20 urn, 50 urn, or 100 urn; iv) the fusosome, or a composition or preparation comprising a plurality of the fusosomes, has a density of other than between 1.08 g/ml and 1.12 g/ml, e.g., the fusosome has a density of 1.25 g/ml+/−0.05, e.g., as measured by an assay of Example 28; v) the fusosome is not captured by the scavenger system in circulation or by Kupffer cells in the sinus of the liver; vi) the source cell is other than a 293 cell; vii) the source cell is not transformed or immortalized; viii) the source cell is transformed, or immortalized using a method other than adenovirus-mediated immortalization, e.g., immortalized by spontaneous mutation, or telomerase expression; ix) the fusogen is other than VSVG, a SNARE protein, or a secretory granule protein; x) the fusosome does not comprise Cre or GFP, e.g., EGFP; xi) the fusosome further comprises an exogenous protein other than Cre or GFP, e.g., EGFP xii) the fusosome further comprises an exogenous nucleic acid (e.g., RNA, e.g., mRNA, miRNA, or siRNA) or an exogenous protein (e.g., an antibody, e.g., an antibody), e.g., in the lumen; or xiii) the fusosome does not comprise mitochondria.

[0407] The present disclosure also provides, in some aspects, a fusosome comprising: (a) a lipid bilayer, (b) a lumen (e.g., comprising cytosol) surrounded by the lipid bilayer, (c) an exogenous or overexpressed fusogen, e.g., wherein the fusogen is disposed in the lipid bilayer, and (d) a functional nucleus,

[0408] wherein the fusosome is derived from a source cell.

[0409] In some embodiments, one or more of the following is present: i) the source cell is other than a dendritic cell or tumor cell, e.g., the source cell is selected from an endothelial cell, a macrophage, a neutrophil, a granulocyte, a leukocyte, a stern cell (e.g., a mesenchymal stern cell, a bone marrow stern cell, an induced pluripotent stern cell, an embryonic stern cell), a myeloblast, a myoblast, a hepatocyte, or a neuron e.g., retinal neuronal cell; ii) the fusogen is other than a fusogenic glycoprotein; iii) the fusogen is a mammalian protein other than fertilin-beta, iv) the fusosome has low immunogenicity, e.g., as described herein; v) the fusosome meets a pharmaceutical or good manufacturing practices (GMP) standard; vi) the fusosome was made according to good manufacturing practices (GMP); vii) the fusosome has a pathogen level below a predetermined reference value, e.g., is substantially free of pathogens; or viii) the fusosome has a contaminant level below a predetermined reference value, e.g., is substantially free of contaminants.

[0410] The present disclosure also provides, in some aspects, a fusosome composition comprising a plurality of fusosomes derived from a source cell, wherein the fusosomes of the plurality comprise: (a) a lipid bilayer, (b) a lumen comprising cytosol, wherein the lumen is surrounded by the lipid bilayer; (c) an exogenous or overexpressed fusogen disposed in the lipid bilayer, (d) a cargo; and wherein the fusosome does not comprise a nucleus; wherein the amount of viral capsid protein in the fusosome composition is less than 1% of total protein; wherein the plurality of fusosomes, when contacted with a target cell population in the presence of an inhibitor of endocytosis, and when contacted with a reference target cell population not treated with the inhibitor of endocytosis, delivers the cargo to at least 30% of the number of cells in the target cell population compared to the reference target cell population.

[0411] The present disclosure also provides, in some aspects, a fusosome composition comprising a plurality of fusosomes derived from a source cell, and wherein the fusosomes of the plurality comprise: (a) a lipid bilayer, (b) a lumen comprising cytosol, wherein the lumen is surrounded by the lipid bilayer; (c) an exogenous or overexpressed re-targeted fusogen disposed in the lipid bilayer; (d) a cargo; and wherein the fusosome does not comprise a nucleus; wherein the amount of viral capsid protein in the fusosome composition is less than 1% of total protein; wherein: (i) when the plurality of fusosomes are contacted with a cell population comprising target cells and non-target cells, the cargo is present in at least 2-fold, 5-fold, 10-fold, 20-fold, 50-fold, or 100-fold more target cells than non-target cells, or (ii) the fusosomes of the plurality fuse at a higher rate with a target cell than with a non-target cell by at least at least 50%.

[0412] The present disclosure also provides, in some aspects, a fusosome composition comprising a plurality of fusosomes derived from a source cell, and wherein the fusosomes of the plurality comprise: (a) a lipid bilayer, (b) a lumen surrounded by the lipid bilayer; (c) an exogenous or overexpressed fusogen, wherein the fusogen is disposed in the lipid bilayer; and (d) a cargo; wherein the fusosome does not comprise a nucleus; and wherein one or more of (e.g., at least 2, 3, 4, or 5 of): i) the fusogen is present at a copy number of at least 1,000 copies; ii) the fusosome comprises a therapeutic agent at a copy number of at least 1,000 copies; iii) the fusosome comprises a lipid wherein one or more of CL, Cer, DAG, HexCer, LPA, LPC, LPE, LPG, LPI, LPS, PA, PC, PE, PG, PI, PS, CE, SM and TAG is within 75% of the corresponding lipid level in the source cell; iv) the fusosome comprises a proteomic composition similar to that of the source cell; v) the fusosome is capable of signal transduction, e.g., transmitting an extracellular signal, e.g., AKT phosphorylation in response to insulin, or glucose (e.g., labeled glucose, e.g., 2-NBDG) uptake in response to insulin, e.g., by at least 10% more than a negative control, e.g., an otherwise similar fusosome in the absence of insulin; vi) the fusosome targets a tissue, e.g., liver, lungs, heart, spleen, pancreas, gastrointestinal tract, kidney, testes, ovaries, brain, reproductive organs, central nervous system, peripheral nervous system, skeletal muscle, endothelium, inner ear, or eye, when administered to a subject, e.g., a mouse, e.g., wherein at least 0.1%, or 10%, of the fusosomes in a population of administered fusosomes are present in the target tissue after 24 hours; or the source cell is selected from a neutrophil, a granulocyte, a mesenchymal stem cell, a bone marrow stem cell, an induced pluripotent stem cell, an embryonic stem cell, a myeloblast, a myoblast, a hepatocyte, or a neuron e.g., retinal neuronal cell.

[0413] In embodiments, one or more of: i) the source cell is other than a 293 cell; ii) the source cell is not transformed or immortalized; iii) the source cell is transformed or immortalized using a method other than adenovirus-mediated immortalization, e.g., immortalized by spontaneous mutation or telomerase expression; iv) the fusogen is other than VSVG, a SNARE protein, or a secretory granule protein; v) the therapeutic agent is other than Cre or EGFP; vi) the therapeutic agent is a nucleic acid (e.g., RNA, e.g., mRNA, miRNA, or siRNA) or an exogenous protein (e.g., an antibody, e.g., an antibody), e.g., in the lumen; or vii) the fusosome does not comprise mitochondria.

[0414] In embodiments, one or more of: i) the source cell is other than a 293 or HEK cell; ii) the source cell is not transformed or immortalized; iii) the source cell is transformed or immortalized using a method other than adenovirus-mediated immortalization, e.g., immortalized by spontaneous mutation or telomerase expression; iv) the fusogen is not a viral fusogen; or v) the fusosome has a size of other than between 40 and 150 nm, e.g., greater than 150 nm, 200 nm, 300 nm, 400 nm, or 500 nm.

In embodiments, one or more of: i) the therapeutic agent is a soluble protein expressed by the source cell; ii) the fusogen is other than TAT, TAT-HA2, HA-2, gp41, Alzheimer's beta-amyloid peptide, a Sendai virus protein, or amphipathic net-negative peptide (WAE 11); iii) the fusogen is a mammalian fusogen; iv) the fusosome comprises in its lumen a polypeptide selected from an enzyme, antibody, or anti-viral polypeptide; v) the fusosome does not comprise an exogenous therapeutic transmembrane protein; or vi) the fusosome does not comprise CD63 or GLUT4, or the fusosome comprises less than or equal to 0.05%, 0.1%, 0.5%, 1%, 2%, 3%, 4%, 5%, or 10% CD63 (e.g., about 0.048% or less), e.g., as determined according to the method described in Example 87.

[0415] In embodiments, the fusosome: i) does not comprise a virus, is not infectious, or does not propagate in a host cell; ii) is not a viral vector, iii) is not a VLP (virus like particle); iv) does not comprise a viral structural protein, e.g., a protein derived from gag, e.g. a viral capsid protein, e.g. a viral capsule protein, e.g., a viral nucleocapsid protein, or wherein the amount of viral capsid protein is less than 10%, 5%, 4%, 3%, 2%, 1%, 0.5%, 0.2%, or 0.1% of total protein, e.g., by mass spectrometry, e.g. using an assay of Example 91; v) does not comprise a viral matrix protein; vi) does not comprise a viral non-structural protein; e.g. pol or a fragment or variant thereof, a viral reverse transcriptase protein, a viral integrase protein, or a viral protease protein. vii) does not comprise viral nucleic acid; e.g. viral RNA or viral DNA; viii) comprises less than 10, 50, 100, 500, 1,000, 2,000, 5,000, 10,000, 20,000, 50,000, 100,000, 200,000, 500,000, 1,000,000, 5,000,000, 10,000,000, 50,000,000, 100,000,000, 500,000,000, or 1,000,000,000 copies per vesicle of a viral structural protein; or ix) the fusosome is not a virosome.

[0416] In some embodiments, the fusosome comprises (or is identified as comprising) less than about 0.01%, 0.05%, 0.1%, 0.5%, 1%, 5%, 10%, 15%, 20%, 25%, 30%, 35%, 40%, 45%, 50%, 60%, 70%, 80%, 90%, 95%, 96%, 97%, 98%, or 99% viral capsid protein (e.g., about 0.05% viral capsid protein). In embodiments, the viral capsid protein is Complex of Rabbit Endogenous Lentivirus (RELIK) Capsid with Cyclophilin A. In embodiments, the viral capsid protein: total protein ratio is (or is identified as being) about 0.01, 0.02, 0.03, 0.04, 0.05, 0.06, 0.07, 0.08, 0.09, or 0.1.

[0417] In some embodiments, the fusosome does not comprise (or is identified as not comprising) a gag protein or a fragment or variant thereof, or the amount of gag protein or fragment or variant thereof is less than 10%, 5%, 4%, 3%, 2%, 1%, 0.5%, 0.2%, or 0.1% of total protein, e.g., by an assay of Example 91.

[0418] In embodiments, the ratio of the copy number of the fusogen to the copy number of viral structural protein on the fusosome is at least 1,000,000:1, 100,000:1, 10,000:1, 1,000:1, 100:1, 50:1, 20:1, 10:1, 5:1, or 1:1; or is between 100:1 and 50:1, 50:1 and 20:1, 20:1 and 10:1, 10:1 and 5:1 or 1:1. In embodiments, the ratio of the copy number of the fusogen to the copy number of viral matrix protein on the fusosome is at least 1,000,000:1, 100.000:1, 10,000:1, 1,000:1, 100:1, 50:1, 20:1, 10:1, 5:1, or 1:1.

[0419] In embodiments, one or more of: i) the fusosome does not comprise a water-immiscible droplet; ii) the fusosome comprises an aqueous lumen and a hydrophilic exterior; iii) the fusogen is a protein fusogen; or iv) the organelle is selected from a mitochondrion, Golgi apparatus, lysosome, endoplasmic reticulum, vacuole, endosome, acrosome, autophagosome, centriole, glycosome, glyoxysome, hydrogenosome, melanosome, mitosome, cnidocyst, peroxisome, proteasome, vesicle, and stress granule.

[0420] In embodiments, one or more of: i) the fusogen is a mammalian fusogen or a viral fusogen; ii) the fusosome was not made by loading the fusosome with a therapeutic or diagnostic substance; iii) the source cell was not loaded with a therapeutic or diagnostic substance; iv) the fusosome does not comprise doxorubicin, dexamethasone, cyclodextrin; polyethylene glycol, a micro RNA e.g., miR125, VEGF receptor, ICAM-1, E-selectin, iron oxide, a fluorescent protein e.g., GFP or RFP, a nanoparticle, or an RNase, or does not comprise an exogenous form of any of the foregoing; or v) the fusosome further comprises an exogenous therapeutic agent having one or more post-translational modifications, e.g., glycosylation.

[0421] In embodiments, the fusosome is unilamellar or multilamellar.

In embodiments, one or more of: i) the fusosome is not an exosome; ii) the fusosome is a microvesicle; iii) the fusosome comprises a non-mammalian fusogen; iv) the fusosome has been engineered to incorporate a fusogen; v) the fusosome comprises an exogenous fusogen; vi) the fusosome has a size of at least 80 nm, 100 nm, 200 nm, 500 nm, 1000 nm, 1200 nm, 1400 nm, or 1500 nm, or a population of fusosomes has an average size of at least 80 nm, 100 nm, 200 nm, 500 nm, 1000 nm, 1200 nm, 1400 nm, or 1500 nm; vii) the fusosome comprises one or more organelles, e.g., a mitochondrion, Golgi apparatus, lysosome, endoplasmic reticulum, vacuole, endosome, acrosome, autophagosome, centriole, glycosome, glyoxysome, hydrogenosome, melanosome, mitosome, cnidocyst, peroxisome, proteasome, vesicle, and stress granule; viii) the fusosome comprises a cytoskeleton or a component thereof, e.g., actin, Arp2/3, formin, coronin, dystrophin, keratin, myosin, or tubulin; ix) the fusosome, or a composition or preparation comprising a plurality of the fusosomes, does not have a flotation density of 1.08-1.22 g/ml, or has a density of at least 1.18-1.25 g/ml, or 1.05-1.12 g/ml, e.g., in a sucrose gradient centrifugation assay, e.g., as described in Théry et al., “Isolation and characterization of exosomes from cell culture supernatants and biological fluids.” Curr Protoc Cell Biol. 2006 April; Chapter 3:Unit 3.22; x) the lipid bilayer is enriched for ceramides or sphingomyelins or a combination thereof compared to the source cell, or the lipid bilayer is not enriched (e.g., is depleted) for glycolipids, free fatty acids, or phosphatidylserine, or a combination thereof, compared to the source cell; xi) the fusosome comprises Phosphatidyl serine (PS) or CD40 ligand or both of PS and CD40 ligand, e.g., when measured in an assay of Example 90; xii) the fusosome is enriched for PS compared to the source cell, e.g., in a population of fusosomes at least 5%, 10%, 20%, 30%, 40%, 50%, 60%, 70%, 80%, or 90% are positive for PS, e.g., by an assay of Kanada M, et al. (2015) Differential fates of biomolecules delivered to target cells via extracellular vesicles. Proc Natl Acad Sci USA 112:E1433-E1442; xiii) the fusosome is substantially free of acetylcholinesterase (AChE), or contains less than 0.001, 0.002, 0.005, 0.01, 0.02, 0.05, 0.1, 0.2, 0.5, 1, 2, 5, 10, 20, 50, 100, 200, 500, or 1000 AChE activity units/ug of protein, e.g., by an assay of Example 50; xiv) the fusosome is substantially free of a Tetraspanin family protein (e.g., CD63, CD9, or CD81), an ESCRT-related protein (e.g., TSG101, CHMP4A-B, or VPS4B), Alix, TSG101, MHCI, MHCII, GP96, actinin-4, mitofilin, syntenin-1, TSG101, ADAM10, EHD4, syntenin-1, TSG101, EHD1, flotillin-1, heat-shock 70-kDa proteins (HSC70/HSP73, HSP70/HSP72), or any combination thereof, or contains less than 0.05%, 0.1%, 0.5%, 1%, 2%, 3%, 4%, 5%, 5%, or 10% of any individual exosomal marker protein and/or less than 0.05%, 0.1%, 0.5%, 1%, 2%, 3%, 4%, 5%, 10%, 15%, 20%, or 25% of total exosomal marker proteins of any of said proteins, or is de-enriched for any one or more of these proteins compared to the source cell, or is not enriched for any one or more of these proteins, e.g., by an assay of Example 87; xv) the fusosome comprises a level of Glyceraldehyde 3-phosphate dehydrogenase (GAPDH) that is below 500, 250, 100, 50, 20, 10, 5, or 1 ng GAPDH/ug total protein or below the level of GAPDH in the source cell, e.g., less than 1%, 2.5%, 5%, 10%, 15%, 20%, 30%, 40%, 50%, 60%, 70%, 80%, or 90%, less than the level of GAPDH per total protein in ng/ug in the source cell, e.g., using an assay of Example 34; xvi) the fusosome is enriched for one or more endoplasmic reticulum proteins (e.g., calnexin), one or more proteasome proteins, or one or more mitochondrial proteins, or any combination thereof, e.g., wherein the amount of calnexin is less than 500, 250, 100, 50, 20, 10, 5, or 1 ng Calnexin/ug total protein, or wherein the fusosome comprises less Calnexin per total protein in ng/ug compared to the source cell by 1%, 2.5%, 5%, 10%, 15%, 20%, 30%, 40%, 50%, 60%, 70%, 80%, or 90%, e.g., using an assay of Example 35 or 88, or wherein the average fractional content of Calnexin in the fusosome is less than about 1×10⁻⁴, 1.5×10⁻⁴, 2×10⁻⁴, 2.1×10⁻⁴, 2.2×10⁻⁴, 2.3×10⁻⁴, 2.4×10⁻⁴, 2.43×10⁻⁴, 2.5×10⁻⁴, 2.6×10⁻⁴, 2.7×10⁻⁴, 2.8×10⁻⁴, 2.9×10⁻⁴, 3×10⁻⁴, 3.5×10⁻⁴, or 4×10⁻⁴, or wherein the fusosome comprises an amount of Calnexin per total protein that is lower than that of the parental cell by about 70%, 75%, 80%, 85%, 88%, 90%, 95%, 99%, or more; xvii) the fusosome comprises an exogenous agent (e.g., an exogenous protein, mRNA, or siRNA) e.g., as measured using an assay of Example 32; or xviii) the fusosome can be immobilized on a mica surface by atomic force microscopy for at least 30 min, e.g., by an assay of Kanada M, et al. (2015) Differential fates of biomolecules delivered to target cells via extracellular vesicles. Proc Natl Acad Sci USA 112:E1433-E1442.

[0422] In embodiments, one or more of: i) the fusosome is an exosome; ii) the fusosome is not a microvesicle; iii) the fusosome has a size of less than 80 nm, 100 nm, 200 nm, 500 nm, 1000 nm, 1200 nm, 1400 nm, or 1500 nm, or a population of fusosomes has an average size of less than 80 nm, 100 nm, 200 nm, 500 nm, 1000 nm, 1200 nm, 1400 nm, or 1500 nm; iv) the fusosome does not comprise an organelle; v) the fusosome does not comprise a cytoskeleton or a component thereof, e.g., actin, Arp2/3, formin, coronin, dystrophin, keratin, myosin, or tubulin; vi) the fusosome, or a composition or preparation comprising a plurality of the fusosomes, has flotation density of 1.08-1.22 g/ml, e.g., in a sucrose gradient centrifugation assay, e.g., as described in Th\tilde{e}ry et al., “Isolation and characterization of exosomes from cell culture supernatants and biological fluids.” Curr Protoc Cell Biol. 2006 April; Chapter 3:Unit 3.22; vii) the lipid bilayer is not enriched (e.g., is depleted) for ceramides or sphingomyelins or a combination thereof compared to the source cell, or the lipid bilayer is enriched for glycolipids, free fatty acids, or phosphatidylserine, or a combination thereof, compared to the source cell; viii) the fusosome does not comprise, or is depleted for relative to the source cell, Phosphatidyl serine (PS) or CD40 ligand or both of PS and CD40 ligand, e.g., when measured in an assay of Example 90; ix) the fusosome is not enriched (e.g., is depleted) for PS compared to the source cell, e.g., in a population of fusosomes less than 20%, 30%, 40%, 50%, 60%, 70%, 80%, or 90% are positive for PS, e.g., by an assay of Kanada M, et al. (2015) Differential fates of biomolecules delivered to target cells via extracellular vesicles. Proc Natl Acad Sci USA 112:E1433-E1442; x) the fusosome comprises acetylcholinesterase (AChE), e.g. at least 0.001, 0.002, 0.005, 0.01, 0.02, 0.05, 0.1, 0.2, 0.5, 1, 2, 5, 10, 20, 50, 100, 200, 500, or 1000 AChE activity units/ug of protein, e.g., by an assay of Example 50; xi) the fusosome comprises a Tetraspanin family protein (e.g., CD63, CD9, or CD81), an ESCRT-related protein (e.g., TSG101, CHMP4A-B, or VPS4B), Alix, TSG101, MHCI, MHCII, GP96, actinin-4, mitofilin, syntenin-1, TSG101, ADAM10, EHD4, syntenin-1, TSG101, EHD1, flotillin-1, heat-shock 70-kDa proteins (HSC70/HSP73, HSP70/HSP72), or any combination thereof, e.g., contains more than 0.05%, 0.1%, 0.5%, 1%, 2%, 3%, 4%, 5%, 5%, or 10% of any individual exosomal marker protein and/or less than 0.05%, 0.1%, 0.5%, 1%, 2%, 3%, 4%, 5%, 10%, 15%, 20%, or 25% of total exosomal marker proteins of any of said proteins, or is enriched for any one or more of these proteins compared to the source cell, e.g., by an assay of Example 87; xii) the fusosome comprises a level of Glyceraldehyde 3-phosphate dehydrogenase (GAPDH) that is above 500, 250, 100, 50, 20, 10, 5, or 1 ng GAPDH/ug total protein or below the level of GAPDH in the source cell, e.g., at least 1%, 2.5%, 5%, 10%, 15%, 20%, 30%, 40%, 50%, 60%, 70%, 80%, or 90%, greater than the level of GAPDH per total protein in ng/ug in the source cell, e.g., using an assay of Example 34; xiii) the fusosome is not enriched for (e.g., is depleted for) one or more endoplasmic reticulum proteins (e.g., calnexin), one or more proteasome proteins, or one or more mitochondrial proteins, or any combination thereof, e.g., wherein the amount of calnexin is less than 500, 250, 100, 50, 20, 10, 5, or 1 ng Calnexin/ug total protein, or wherein the fusosome comprises less Calnexin per total protein in ng/ug compared to the source cell by 1%, 2.5%, 5%, 10%, 15%, 20%, 30%, 40%, 50%, 60%, 70%, 80%, or 90%, e.g., using an assay of Example 88, or wherein the average fractional content of Calnexin in the fusosome is less than about 1×10⁻⁴, 1.5×10⁻⁴, 2×10⁻⁴, 2.1×10⁻⁴, 2.2×10⁻⁴, 2.3×10⁻⁴, 2.4×10⁻⁴, 2.43×10⁻⁴, 2.5×10⁻⁴, 2.6×10⁻⁴, 2.7×10⁻⁴, 2.8×10⁻⁴, 2.9×10⁻⁴, 3×10⁻⁴, 3.5×10⁻⁴, or 4×10⁻⁴, or wherein the fusosome comprises an amount of Calnexin per total protein that is lower than that of the parental cell by about 70%, 75%, 80%, 85%, 88%, 90%, 95%, 99%, or more; or xiv) the fusosome can not be immobilized on a mica surface by atomic force microscopy for at least 30 min, e.g., by an assay of Kanada M, et al. (2015) Differential fates of biomolecules delivered to target cells via extracellular vesicles. Proc Natl Acad Sci USA 112:E1433-E1442.

In embodiments, one or more of: i) the fusosome does not comprise a VLP; ii) the fusosome does not comprise a virus; iii) the fusosome does not comprise a replication-competent virus; iv) the fusosome does not comprise a viral protein, e.g., a viral structural protein, e.g., a capsid protein or a viral matrix protein; v) the fusosome does not comprise a capsid protein from an enveloped virus; vi) the fusosome does not comprise a nucleocapsid protein; or vii) the fusogen is not a viral fusogen.

[0423] In embodiments, the fusosome comprises cytosol.

[0424] In embodiments, one or more of: i) the fusosome or the source cell does not form a teratoma when implanted into subject, e.g., by an assay of Example 63; ii) the fusosome is capable of chemotaxis, e.g., of within 1%, 2%, 3%, 4%, 5%, 10%, 20%, 30%, 40%, 50%, 60%, 70%, 80%, 90%, 100% or greater than a reference cell, e.g., a macrophage, e.g., using an assay of Example 43; iii) the fusosome is capable of homing, e.g., at the site of an injury, wherein the fusosome or cytobiologic is from a human cell, e.g., using an assay of Example 44, e.g., wherein the source cell is a neutrophil; or iv) the fusosome is capable of phagocytosis, e.g., wherein phagocytosis by the fusosome is detectable within 0.5, 1, 2, 3, 4, 5, or 6 hours in using an assay of Example 45, e.g., wherein the source cell is a macrophage.

[0425] In embodiments, the fusosome or fusosome composition retains one, two, three, four, five, six or more of any of the characteristics for 5 days or less, e.g., 4 days or less, 3 days or less, 2 days or less, 1 day or less, e.g., about 12-72 hours, after administration into a subject, e.g., a human subject.

In embodiments, the fusosome has one or more of the following characteristics: a) comprises one or more endogenous proteins from a source cell, e.g., membrane proteins or cytosolic proteins; b) comprises at least 10, 20, 50, 100, 200, 500, 1000, 2000, or 5000 different proteins; c) comprises at least 1, 2, 5, 10, 20, 50, or 100 different glycoproteins; d) at least 10%, 20%, 30%, 40%, 50%, 60%, 70%, 80%, or 90% by mass of the proteins in the fusosome are naturally-occurring proteins; e) comprises at least 10, 20, 50, 100, 200, 500, 1000, 2000, or 5000 different RNAs; or f) comprises at least 2, 3, 4, 5, 10, or 20 different lipids, e.g., selected from CL, Cer, DAG, HexCer, LPA, LPC, LPE, LPG, LPI, LPS, PA, PC, PE, PG, PI, PS, CE, SM and TAG.

[0426] In embodiments, the fusosome has been manipulated to have, or the fusosome is not a naturally occurring cell and has, or wherein the nucleus does not naturally have one, two, three, four, five or more of the following properties: a) the partial nuclear inactivation results in a reduction of at least 50%, 60%, 70%, 80%, 90% or more in nuclear function, e.g., a reduction in transcription or DNA replication, or both, e.g., wherein transcription is measured by an assay of Example 22 and DNA replication is measured by an assay of Example 23; b) the fusosome is not capable of transcription or has transcriptional activity of less than 1%, 2.5% 5%, 10%, 20%, 30%, 40%, 50%, 60%, 70%, 80%, or 90% of that of the transcriptional activity of a reference cell, e.g., the source cell, e.g., using an assay of Example 22; c) the fusosome is not capable of nuclear DNA replication or has nuclear DNA replication of less than 1%, 2.5% 5%, 10%, 20%, 30%, 40%, 50%, 60%, 70%, 80%, or 90% of the nuclear DNA replication of a reference cell, e.g., the source cell, e.g., using an assay of Example 23; d) the fusosome lacks chromatin or has a chromatin content of less than 1%, 2.5% 5%, 10%, 20%, 30%, 40%, 50%, 60%, 70%, 80%, or 90% of the of the chromatin content of a reference cell, e.g., the source cell, e.g., using an assay of Example 30; e) the fusosome lacks a nuclear membrane or has less than 50%, 40%, 30%, 20%, 10%, 5%, 4%, 3%, 2%, or 1% the amount of nuclear membrane of a reference cell, e.g., the source cell or a Jurkat cell, e.g., by an assay of Example 29; f) the fusosome lacks functional nuclear pore complexes or has reduced nuclear import or export activity, e.g., by at least 50%, 40%, 30%, 20%, 10%, 5%, 4%, 3%, 2%, or 1% by an assay of Example 29, or the fusosome lacks on or more of a nuclear pore protein, e.g., NUP98 or Importin 7; g) the fusosome does not comprise histones or has histone levels less than 1%, 2%, 3%, 4%, 5%, 10%, 20%, 30%, 40%, 50%, 60%, 70%, 80%, or 90% of the histone level of the source cell (e.g., of H1, H2a, H2b, H3, or H4), e.g., by an assay of Example 30; h) the fusosome comprises less than 20, 10, 5, 4, 3, 2, or 1 chromosome; i) nuclear function is eliminated; j) the fusosome is an enucleated mammalian cell; k) the nucleus is removed or inactivated, e.g., extruded by mechanical force, by radiation or by chemical ablation; or 1) the fusosome is from a mammalian cell having DNA that is completely or partially removed, e.g., during interphase or mitosis.

[0427] In embodiments, the fusosome comprises mtDNA or vector DNA. In embodiments, the fusosome does not comprise DNA.

[0428] In embodiments, the source cell is a primary cell, immortalized cell or a cell line (e.g., myelobast cell line, e.g., C2C12). In embodiments, the fusosome is from a source cell having a modified genome, e.g., having reduced immunogenicity (e.g., by genome editing, e.g., to remove an MHC protein or MHC complexes). In embodiments, the source cell is from a cell culture treated with an anti-inflammatory signal. In embodiments, the source cell is from a cell culture treated with an immunosuppressive agent. In embodiments, the source cell is substantially non-immunogenic, e.g., using an assay described herein. In embodiments, the source cell comprises an exogenous agent, e.g., a therapeutic agent. In embodiments, the source cell is a recombinant cell.

[0429] In embodiments, the fusosome further comprises an exogenous agent, e.g., a therapeutic agent, e.g., a protein or a nucleic acid (e.g., a DNA, a chromosome (e.g. a human artificial chromosome), an RNA, e.g., an mRNA or miRNA). In embodiments, the exogenous agent is present at at least, or no more than, 10, 20, 50, 100, 200, 500, 1,000, 2,000, 5,000, 10,000, 20,000, 50,000, 100,000, 200,000, 500,000, 1,000,000, 5,000,000, 10,000,000, 50,000,000, 100,000,000, 500,000,000, or 1,000,000,000 copies, e.g., comprised by the fusosome, or is present at an average level of at least, or no more than, 10, 20, 50, 100, 200, 500, 1,000, 2,000, 5,000, 10,000, 20,000, 50,000, 100,000, 200,000, 500,000 or 1,000,000 copies per fusosome. In embodiments, the fusosome has an altered, e.g., increased or decreased level of one or more endogenous molecules, e.g., protein or nucleic acid, e.g., due to treatment of the mammalian cell with a siRNA or gene editing enzyme. In embodiments, the endogenous molecule is present at, e.g. an average level, of at least, or no more than, 10, 20, 50, 100, 200, 500, 1,000, 2,000, 5,000, 10,000, 20,000, 50,000, 100,000, 200,000, 500,000, 1,000,000, 5,000,000, 10,000,000, 50,000,000, 100,000,000, 500,000,000, or 1,000,000,000 copies (e.g., copies comprised by the fusosome), or is present at an average level of at least, or no more than, 10, 20, 50, 100, 200, 500, 1,000, 2,000, 5,000, 10,000, 20,000, 50,000, 100,000, 200,000, 500,000 or 1,000,000 copies per fusosome. In embodiments, the endogenous molecule (e.g., an RNA or protein) is present at a concentration of at least 1, 2, 3, 4, 5, 10, 20, 50, 100, 500, 10³, 5.0×10³, 10⁴, 5.0×10⁴, 10⁵, 5.0×10⁵, 10⁶, 5.0×10⁶, 1.0×10⁷, 5.0×10⁷, or 1.0×10⁸, greater than its concentration in the source cell.

[0430] In embodiments, the active agent is selected from a protein, protein complex (e.g., comprising at least 2, 3, 4, 5, 10, 20, or 50 proteins, e.g., at least at least 2, 3, 4, 5, 10, 20, or 50 different proteins) polypeptide, nucleic acid (e.g., DNA, chromosome, or RNA, e.g., mRNA, siRNA, or miRNA) or small molecule. In embodiments, the exogenous agent comprises a site-specific nuclease, e.g., Cas9 molecule, TALEN, or ZFN.

[0431] In embodiments, the fusogen is a viral fusogen, e.g., HA, HIV-1 ENV, HHV-4, gp120, or VSV-G. In embodiments, the fusogen is a mammalian fusogen, e.g., a SNARE, a Syncytin, myomaker, myomixer, myomerger, or FGFRL1. In embodiments, the fusogen is active at a pH of 4-5, 5-6, 6-7, 7-8, 8-9, or 9-10. In embodiments, the fusogen is not active at a pH of 4-5, 5-6, 6-7, 7-8, 8-9, or 9-10. In embodiments, the fusosome fuses to a target cell at the surface of the target cell. In embodiments, the fusogen promotes fusion in a lysosome-independent manner. In embodiments, the fusogen is a protein fusogen. In embodiments, the fusogen is a lipid fusogen, e.g., oleic acid, glycerol mono-oleate, a glyceride, diacylglycerol, or a modified unsaturated fatty acid. In embodiments, the fusogen is a chemical fusogen, e.g., PEG. In embodiments, the fusogen is a small molecule fusogen, e.g., halothane, an NSAID such as meloxicam, piroxicam, tenoxicam, and chlorpromazine. In embodiments, the fusogen is recombinant. In embodiments, the fusogen is biochemically incorporated, e.g., the fusogen is provided as a purified protein and contacted with a lipid bilayer under conditions that allow for associate of the fusogen with the lipid bilayer. In embodiments, the fusogen is biosynthetically incorporated, e.g. expressed in a source cell under conditions that allow the fusogen to associate with the lipid bilayer.

[0432] In embodiments, the fusosome binds a target cell. In embodiments, the target cell is other than a HeLa cell, or the target cell is not transformed or immortalized.

[0433] In some embodiments involving fusosome compositions, the plurality of fusosomes are the same. In some embodiments, the plurality of fusosomes are different. In some embodiments the plurality of fusosomes are from one or more source cells. In some embodiments at least 50%, 60%, 70%, 80%, 90%, 95%, or 99% of fusosomes in the plurality have a diameter within 10%, 20%, 30%, 40%, or 50% of the mean diameter of the fusosomes in the fusosome composition. In some embodiments at least 50%, 60%, 70%, 80%, 90%, 95%, or 99% of fusosomes in the plurality have a volume within 10%, 20%, 30%, 40%, or 50% of the mean volume of the fusosomes in the fusosome composition. In some embodiments, the fusosome composition has less than about 90%, 80%, 70%, 60%, 50%, 40%, 30%, 20%, 10%, 5%, variability in size distribution within 10%, 50%, or 90% of the source cell population variability in size distribution, e.g., based on Example 26. In some embodiments, at least 50%, 60%, 70%, 80%, 90%, 95%, or 99% of fusosomes in the plurality have a copy number of the fusogen within 10%, 20%, 30%, 40%, 50%, 60%, 70%, 80%, or 90% of the mean fusogen copy number in the fusosomes in the fusosome composition. In some embodiments, at least 50%, 60%, 70%, 80%, 90%, 95%, or 99% of fusosomes in the plurality have a copy number of the therapeutic agent within 10%, 20%, 30%, 40%, 50%, 60%, 70%, 80%, or 90% of the mean therapeutic agent copy number in the fusosomes in the fusosome composition. In some embodiments, the fusosome composition comprises at least 10⁵, 10⁶, 10⁷, 10⁸, 10⁹, 10¹⁰, 10¹¹, 10¹², 10¹³, 10¹⁴, or 10¹⁵ or more fusosomes. In some embodiments, the fusosome composition is in a volume of at least 1 ul, 2 ul, 5 ul, 10 ul, 20 ul, 50 ul, 100 ul, 200 ul, 500 ul, 1 ml, 2 ml, 5 ml, or 10 ml.

[0434] In some embodiments, the fusosome composition delivers the cargo to at least 40%, 45%, 50%, 55%, 60%, 65%, 70%, 75%, 80%, 85%, 90%, 95%, 96%, 97%, 98%, or 99% of the number of cells in the target cell population compared to the reference target cell population.

[0435] In some embodiments, the fusosome composition delivers at least 40%, 45%, 50%, 55%, 60%, 65%, 70%, 75%, 80%, 85%, 90%, 95%, 96%, 97%, 98%, or 99% of the cargo to the target cell population compared to the reference target cell population or to a non-target cell population. In some embodiments, the fusosome composition delivers at least 40%, 45%, 50%, 55%, 60%, 65%, 70%, 75%, 80%, 85%, 90%, 95%, 96%, 97%, 98%, or 99% more of the cargo to the target cell population compared to the reference target cell population or to a non-target cell population.

[0436] In some embodiments, less than 10% of cargo enters the cell by endocytosis.

[0437] In some embodiments, the inhibitor of endocytosis is an inhibitor of lysosomal acidification, e.g., bafilomycin A1. In some embodiments, the inhibitor of endocytosis is a dynamin inhibitor, e.g., Dynasore.

[0438] In some embodiments, the target cell population is at a physiological pH (e.g., between 7.3-7.5, e.g., between 7.38-7.42).

[0439] In some embodiments, the cargo delivered is determined using an endocytosis inhibition assay, e.g., an assay of Example 78.

[0440] In some embodiments, cargo enters the cell through a dynamin-independent pathway or a lysosomal acidification-independent pathway, a macropinocytosis-independent pathway (e.g., wherein the inhibitor of endocytosis is an inhibitor of macropinocytosis, e.g., 5-(N-ethyl-N-isopropyl)amiloride (EIPA), e.g., at a concentration of 25 μM), or an actin-independent pathway (e.g., wherein the inhibitor of endocytosis is an inhibitor of actin polymerization is, e.g., Latrunculin B, e.g., at a concentration of 6 μM).

[0441] In some embodiments, the fusosomes of the plurality further comprise a targeting moiety. In embodiments, the targeting moiety is comprised by the fusogen or is comprised by a separate molecule.

[0442] In some embodiments, when the plurality of fusosomes are contacted with a cell population comprising target cells and non-target cells, the cargo is present in at least 10-fold more target cells than non-target cells.

[0443] In some embodiments, when the plurality of fusosomes are contacted with a cell population comprising target cells and non-target cells, the cargo is present at least 2-fold, 5-fold, 10-fold, 20-fold, or 50-fold higher in target cells than non-target cells and/or the cargo is present at least 2-fold, 5-fold, 10-fold, 20-fold, or 50-fold higher in target cells than reference cells.

[0444] In some embodiments, the fusosomes of the plurality fuse at a higher rate with a target cell than with a non-target cell by at least 50%.

[0445] In some embodiments, the fusosome, when contacted with a target cell population, delivers cargo to a target cell location other than an endosome or lysosome, e.g., to the cytosol. In embodiments, less 50%, 40%, 30%, 20%, or 10% of the cargo is delivered to an endosome or lysosome.

[0446] In some embodiments, the fusosomes of the plurality comprise exosomes, microvesicles, or a combination thereof.

[0447] In some embodiments, the plurality of fusosomes has an average size of at least 50 nm, 100 nm, 200 nm, 500 nm, 1000 nm, 1200 nm, 1400 nm, or 1500 nm. In other embodiments, the plurality of fusosomes has an average size of less than 100 nm, 80 nm, 60 nm, 40 nm, or 30 nm.

[0448] In some embodiments, the fusogen (e.g., re-targeted fusogen) comprises a mammalian fusogen. In some embodiments, the fusogen (e.g., re-targeted fusogen) comprises a viral fusogen. In some embodiments, the fusogen (e.g., re-targeted fusogen) is a protein fusogen. In some embodiments, the fusogen (e.g., re-targeted fusogen) comprises a sequence chosen from a Nipah virus protein F, a measles virus F protein, a tupaia paramyxovirus F protein, a paramyxovirus F protein, a Hendra virus F protein, a Henipavirus F protein, a Morbilivirus F protein, a respirovirus F protein, a Sendai virus F protein, a rubulavirus F protein, or an avulavirus F protein, or a derivative thereof.

[0449] In some embodiments, the fusogen (e.g., re-targeted fusogen) is active at a pH of 4-5, 5-6, 6-7, 7-8, 8-9, or 9-10. In some embodiments, the fusogen (e.g., re-targeted fusogen) is not active at a pH of 4-5, 5-6, 6-7, 7-8, 8-9, or 9-10.

[0450] In some embodiments, the fusogen is present at a copy number of at least 1, 2, 5, or 10 copies per fusosome.

[0451] In some embodiments, the fusogen (e.g., re-targeted fusogen) comprises a Nipah virus protein G, a measles protein H, a tupaia paramyxovirus H protein, a paramyxovirus G protein, a paramyxovirus H protein, a paramyxovirus HN protein, a Morbilivirus H protein, a respirovirus HN protein, a sendai HN protein, a rubulavirus HN protein, an avulavirus HN protein, or a derivative thereof. In some embodiments, the fusogen (e.g., re-targeted fusogen) comprises a sequence chosen from Nipah virus F and G proteins, measles virus F and H proteins, tupaia paramyxovirus F and H proteins, paramyxovirus F and G proteins or F and H proteins or F and HN proteins, Hendra virus F and G proteins, Henipavirus F and G proteins, Morbilivirus F and H proteins, respirovirus F and HN protein, a Sendai virus F and HN protein, rubulavirus F and HN proteins, or avulavirus F and HN proteins, or a derivative thereof, or any combination thereof.

[0452] In some embodiments, the cargo comprises an exogenous protein or an exogenous nucleic acid. In some embodiments, the cargo comprises or encodes a cytosolic protein. In some embodiments the cargo comprises or encodes a membrane protein. In some embodiments, the cargo comprises a therapeutic agent. In some embodiments, the cargo is present at a copy number of at least 1, 2, 5, 10, 20, 50, 100, or 200 copies per fusosome (e.g., up to about 1,000 copies per fusosome). In some embodiments, the ratio of the copy number of the fusogen (e.g., re-targeted fusogen) to the copy number of the cargo is between 1000:1 and 1:1, or between 500:1 and 1:1 or between 250:1 and 1:1, or between 150:1 and 1:1, or between 100:1 and 1:1, or between 75:1 and 1:1 or between 50:1 and 1:1 or between 25:1 and 1:1 or between 20:1 and 1:1 or between 15:1 and 1:1 or between 10:1 and 1:1 or between 5:1 and 1:1 or between 2:1 and 1:1 or between 1:1 and 1:2.

[0453] In some embodiments, the fusosome composition comprises a viral capsid protein or a DNA integration polypeptide. In some embodiments, the cargo comprises a viral genome.

[0454] In some embodiments, the fusosome composition is capable of delivering a nucleic acid to a target cell, e.g., to stably modify the genome of the target cell, e.g., for gene therapy.

[0455] In some embodiments, the fusosome composition does not comprise a viral nucleocapsid protein, or the amount of viral nucleocapside protein is less than 10%, 5%, 4%, 3%, 2%, 1%, 0.5%, 0.2%, or 0.1% of total protein, e.g., by mass spectrometry, e.g. using an assay of Example 91.

[0456] In embodiments, the fusosome composition comprises at least 10⁵, 10⁶, 10⁷, 10⁸, 10⁹, 10¹⁰, 10¹¹, 10¹², 10¹³, 10¹⁴, or 10¹⁵ fusosomes. In embodiments, the fusosome composition comprises at least 10 ml, 20 ml, 50 ml, 100 ml, 200 ml, 500 ml, 1 L, 2 L, 5 L, 10 L, 20 L, or 50 L.

[0457] In embodiments, the fusosome is from a mammalian cell having a modified genome, e.g., to reduce immunogenicity (e.g., by genome editing, e.g., to remove an MHC protein or MHC complexes). In embodiments, the source cell is from a cell culture treated with an anti-inflammatory signal. In embodiments, the method further comprises contacting the source cell of step a) with an immunosuppressive agent or anti-inflammatory signal, e.g., before or after inactivating the nucleus, e.g., enucleating the cell.

[0458] In one aspect, provided herein is a fusosome composition comprising a plurality of fusosomes derived from a source cell, wherein the fusosomes of the plurality comprise: (a) a lipid bilayer, (b) a lumen comprising cytosol, wherein the lumen is surrounded by the lipid bilayer; (c) an exogenous or overexpressed fusogen disposed in the lipid bilayer, (d) a cargo; and wherein the fusosome does not comprise a nucleus; wherein the amount of viral capsid protein in the fusosome composition is less than 1% of total protein; wherein the plurality of fusosomes, when contacted with a target cell population in the presence of an inhibitor of endocytosis, and when contacted with a reference target cell population not treated with the inhibitor of endocytosis, delivers the cargo to at least 30% of the number of cells in the target cell population compared to the reference target cell population.

[0459] In embodiments, the fusosome composition delivers the cargo to at least 40%, 50%, 60%, 70%, or 80% of the number of cells in the target cell population compared to the reference target cell population or to a non-target cell population; or delivers the cargo, e.g., at least 40%, 50%, 60%, 70%, or 80% of the cargo, to the target cell population compared to the reference target cell population or to a non-target cell population. In embodiments, less than 10% of cargo enters the cell by endocytosis. In embodiments, the inhibitor of endocytosis is an inhibitor of lysosomal acidification, e.g., bafilomycin A1. In embodiments, cargo delivered is determined using an endocytosis inhibition assay, e.g., an assay of Example 78. In embodiments, cargo enters the cell through a dynamin-independent pathway or a lysosomal acidification-independent pathway, a macropinocytosis-independent pathway (e.g., wherein the inhibitor of endocytosis is an inhibitor of macropinocytosis, e.g., 5-(N-ethyl-N-isopropyl)amiloride (EIPA), e.g., at a concentration of 25 μM), or an actin-independent pathway (e.g., wherein the inhibitor of endocytosis is an inhibitor of actin polymerization is, e.g., Latrunculin B, e.g., at a concentration of 6 μM).

### C. Fusogens and Pseudotyping

[0460] In some embodiments, the fusosome described herein (e.g., comprising a vesicle or a portion of a cell) includes one or more fusogens, e.g., to facilitate the fusion of the fusosome to a membrane, e.g., a cell membrane. Also these compositions may include surface modifications made during or after synthesis to include one or more fusogens. The surface modification may comprise a modification to the membrane, e.g., insertion of a lipid or protein into the membrane.

[0461] In some embodiments, the fusosomes comprise one or more fusogens on their exterior surface (e.g., integrated into the cell membrane) to target a specific cell or tissue type (e.g., HSC). In some embodiments, the specific cell type targeted by the one or more fusogens is a hematopoietic stem cell, optionally wherein the HSC is a myeloid-lymphoid balanced HSC, a myeloid-biased HSC, a lymphoid-biased HSC, a platelet-biased HSC, a platelet-myeloid-biased HSC, a long-term repopulating HSC, an intermediate-term repopulating HSC, or a short-term repopulating HSC. Fusosomes may comprise a targeting domain. Fusogens include without limitation protein based, lipid based, and chemical based fusogens. The fusogen may bind a partner, e.g., a feature on a target cells' surface. In some embodiments the partner on a target cells' surface is a target cell moiety. In particular embodiments, a fusogen is a fusogen or a re-targeted fusogen that binds to a target cell from among a hematopoietic stem cell, optionally wherein the HSC is a myeloid-lymphoid balanced HSC, a myeloid-biased HSC, a lymphoid-biased HSC, a platelet-biased HSC, a platelet-myeloid-biased HSC, a long-term repopulating HSC, an intermediate-term repopulating HSC, or a short-term repopulating HSC. In some embodiments, the fusosome comprising the fusogen will integrate the membrane into a lipid bilayer of a target cell.

[0462] In some embodiments, one or more of the fusogens described herein may be included in the fusosome.

[0463] The fusosomes (e.g., retroviral vectors) described herein can comprise a fusogen, e.g., an endogenous fusogen or a pseudotyped fusogen.

### i) Protein Fusogens

[0464] In some embodiments, the fusogen comprises a protein (e.g., glycoprotein), lipid, or small molecule. A fusogen can be, for instance, a mammalian fusogen or a viral fusogen. In some embodiments, the fusogen is a protein fusogen, e.g., a mammalian protein or a homologue of a mammalian protein (e.g., having 50%, 60%, 70%, 80%, 85%, 90%, 95%, 96%, 97%, 98%, 99%, or greater identity), a non-mammalian protein such as a viral protein or a homologue of a viral protein (e.g., having 50%, 60%, 70%, 80%, 85%, 90%, 95%, 96%, 97%, 98%, 99%, or greater identity), a native protein or a derivative of a native protein, a synthetic protein, a fragment thereof, a variant thereof, a protein fusion comprising one or more of the fusogens or fragments, and any combination thereof. In some embodiments, a viral fusogen is a Class I viral membrane fusion protein, a Class II viral membrane protein, a Class III viral membrane fusion protein, a viral membrane glycoprotein, or other viral fusion proteins, or a homologue thereof, a fragment thereof, a variant thereof, or a protein fusion comprising one or more proteins or fragments thereof.

[0465] In embodiments, the fusogen is a viral fusogen, e.g., HA, HIV-1 ENV, HHV-4, gp120, or VSV-G. In embodiments, the fusogen is a mammalian fusogen, e.g., a SNARE, a Syncytin, myomaker, myomixer, myomerger, or FGFRL1. In embodiments, the fusogen is active at a pH of 4-5, 5-6, 6-7, 7-8, 8-9, or 9-10. In embodiments, the fusogen is not active at a pH of 4-5, 5-6, 6-7, 7-8, 8-9, or 9-10. In embodiments, the fusosome fuses to a target cell at the surface of the target cell. In embodiments, the fusogen promotes fusion in a lysosome-independent manner. In embodiments, the fusogen is a protein fusogen. In embodiments, the fusogen is a lipid fusogen, e.g., oleic acid, glycerol mono-oleate, a glyceride, diacylglycerol, or a modified unsaturated fatty acid. In embodiments, the fusogen is a chemical fusogen, e.g., PEG. In embodiments, the fusogen is a small molecule fusogen, e.g., halothane, an NSAID such as meloxicam, piroxicam, tenoxicam, and chlorpromazine. In embodiments, the fusogen is recombinant. In embodiments, the fusogen is biochemically incorporated, e.g., the fusogen is provided as a purified protein and contacted with a lipid bilayer under conditions that allow for associate of the fusogen with the lipid bilayer. In embodiments, the fusogen is biosynthetically incorporated, e.g. expressed in a source cell under conditions that allow the fusogen to associate with the lipid bilayer.

[0466] In some embodiments, the fusogen (e.g., re-targeted fusogen) comprises a mammalian fusogen. In some embodiments, the fusogen (e.g., re-targeted fusogen) comprises a viral fusogen. In some embodiments, the fusogen (e.g., re-targeted fusogen) is a protein fusogen. In some embodiments, the fusogen (e.g., re-targeted fusogen) comprises a sequence chosen from a Nipah virus protein F, a measles virus F protein, a tupaia paramyxovirus F protein, a paramyxovirus F protein, a Hendra virus F protein, a Henipavirus F protein, a Morbilivirus F protein, a respirovirus F protein, a Sendai virus F protein, a rubulavirus F protein, or an avulavirus F protein, or a derivative thereof.

[0467] In some embodiments, the fusogen (e.g., re-targeted fusogen) is active at a pH of 4-5, 5-6, 6-7, 7-8, 8-9, or 9-10. In some embodiments, the fusogen (e.g., re-targeted fusogen) is not active at a pH of 4-5, 5-6, 6-7, 7-8, 8-9, or 9-10.

[0468] In some embodiments, the fusogen is present at a copy number of at least 1, 2, 5, or 10 copies per fusosome.

[0469] In some embodiments, the fusogen (e.g., re-targeted fusogen) comprises a Nipah virus protein G, a measles protein H, a tupaia paramyxovirus H protein, a paramyxovirus G protein, a paramyxovirus H protein, a paramyxovirus HN protein, a Morbilivirus H protein, a respirovirus HN protein, a sendai HN protein, a rubulavirus HN protein, an avulavirus HN protein, or a derivative thereof. In some embodiments, the fusogen (e.g., re-targeted fusogen) comprises a sequence chosen from Nipah virus F and G proteins, measles virus F and H proteins, tupaia paramyxovirus F and H proteins, paramyxovirus F and G proteins or F and H proteins or F and HN proteins, Hendra virus F and G proteins, Henipavirus F and G proteins, Morbilivirus F and H proteins, respirovirus F and HN protein, a Sendai virus F and HN protein, rubulavirus F and HN proteins, or avulavirus F and HN proteins, or a derivative thereof, or any combination thereof.

[0470] Non-mammalian fusogens include viral fusogens, homologues thereof, fragments thereof, and fusion proteins comprising one or more proteins or fragments thereof. Viral fusogens include class I fusogens, class II fusogens, class III fusogens, and class IV fusogens. In embodiments, class I fusogens such as human immunodeficiency virus (HIV) gp41, have a characteristic postfusion conformation with a signature trimer of α-helical hairpins with a central coiled-coil structure. Class I viral fusion proteins include proteins having a central postfusion six-helix bundle. Class I viral fusion proteins include influenza HA, parainfluenza F, HIV Env, Ebola GP, hemagglutinins from orthomyxoviruses, F proteins from paramyxoviruses (e.g. Measles, (Katoh et al. BMC Biotechnology 2010, 10:37)), ENV proteins from retroviruses, and fusogens of filoviruses and coronaviruses. In embodiments, class II viral fusogens such as dengue E glycoprotein, have a structural signature of β-sheets forming an elongated ectodomain that refolds to result in a trimer of hairpins. In embodiments, the class II viral fusogen lacks the central coiled coil. Class II viral fusogen can be found in alphaviruses (e.g., El protein) and flaviviruses (e.g., E glycoproteins). Class II viral fusogens include fusogens from Semliki Forest virus, Sinbis, rubella virus, and dengue virus. In embodiments, class III viral fusogens such as the vesicular stomatitis virus G glycoprotein, combine structural signatures found in classes I and II. In embodiments, a class III viral fusogen comprises α helices (e.g., forming a six-helix bundle to fold back the protein as with class I viral fusogens), and β sheets with an amphiphilic fusion peptide at its end, reminiscent of class II viral fusogens. Class III viral fusogens can be found in rhabdoviruses and herpesviruses. In embodiments, class IV viral fusogens are fusion-associated small transmembrane (FAST) proteins (doi:10.1038/sj.emboj.7600767, Nesbitt, Rae L., “Targeted Intracellular Therapeutic Delivery Using Liposomes Formulated with Multifunctional FAST proteins” (2012). Electronic Thesis and Dissertation Repository. Paper 388), which are encoded by nonenveloped reoviruses. In embodiments, the class IV viral fusogens are sufficiently small that they do not form hairpins (doi: 10.1146/annurev-cellbio-101512-122422, doi: 10.1016/j.devcel.2007 0.12.008).

[0471] Fusogens, which include viral envelope proteins (env), generally determine the range of host cells which can be infected and transformed by fusosomes. In the case of lentiviruses, such as HIV-1, HIV-2, SIV, FIV and EIV, the native env proteins include gp41 and gp120. In some embodiments, the viral env proteins expressed by source cells described herein are encoded on a separate vector from the viral gag and pol genes, as has been previously described.

[0472] Illustrative examples of retroviral-derived env genes which can be employed include, but are not limited to: MLV envelopes, 10A1 envelope, BAEV, FeLV-B, RD114, SSAV, Ebola, Sendai, FPV (Fowl plague virus), and influenza virus envelopes. Similarly, genes encoding envelopes from RNA viruses (e.g., RNA virus families of Picornaviridae, Calciviridae, Astroviridae, Togaviridae, Flaviviridae, Coronaviridae, Paramyxoviridae, Rhabdoviridae, Filoviridae, Orthomyxoviridae, Bunyaviridae, Arenaviridae, Reoviridae, Birnaviridae, Retroviridae) as well as from the DNA viruses (families of Hepadnaviridae, Circoviridae, Parvoviridae, Papovaviridae, Adenoviridae, Herpesviridae, Poxyiridae, and Iridoviridae) may be utilized. Representative examples include, FeLV, VEE, HFVW, WDSV, SFV, Rabies, ALV, BIV, BLV, EBV, CAEV, SNV, ChTLV, STLV, MPMV, SMRV, RAV, FuSV, MH2, AEV, AMV, CT10, and EIAV.

[0473] In some embodiments, envelope proteins for display on a fusosome include, but are not limited to any of the following sources: Influenza A such as H1N1, H1N2, H3N2 and H5N1 (bird flu), Influenza B, Influenza C virus, Hepatitis A virus, Hepatitis B virus, Hepatitis C virus, Hepatitis D virus, Hepatitis E virus, Rotavirus, any virus of the Norwalk virus group, enteric adenoviruses, parvovirus, Dengue fever virus, Monkey pox, Mononegavirales, Lyssavirus such as rabies virus, Lagos bat virus, Mokola virus, Duvenhage virus, European bat virus 1 & 2 and Australian bat virus, Ephemerovirus, Vesiculovirus, Vesicular Stomatitis Virus (VSV), Herpesviruses such as Herpes simplex virus types 1 and 2, varicella zoster, cytomegalovirus, Epstein-Bar virus (EBV), human herpesviruses (HHV), human herpesvirus type 6 and 8, Human immunodeficiency virus (HIV), papilloma virus, murine gammaherpesvirus, Arenaviruses such as Argentine hemorrhagic fever virus, Bolivian hemorrhagic fever virus, Sabia-associated hemorrhagic fever virus, Venezuelan hemorrhagic fever virus, Lassa fever virus, Machupo virus, Lymphocytic choriomeningitis virus (LCMV), Bunyaviridiae such as Crimean-Congo hemorrhagic fever virus, Hantavirus, hemorrhagic fever with renal syndrome causing virus, Rift Valley fever virus, Filoviridae (filovirus) including Ebola hemorrhagic fever and Marburg hemorrhagic fever, Flaviviridae including Kaysanur Forest disease virus, Omsk hemorrhagic fever virus, Tick-borne encephalitis causing virus and Paramyxoviridae such as Hendra virus and Nipah virus, variola major and variola minor (smallpox), alphaviruses such as Venezuelan equine encephalitis virus, eastern equine encephalitis virus, western equine encephalitis virus, SARS-associated coronavirus (SARS-CoV), West Nile virus, any encephaliltis causing virus.

[0474] In some embodiments, a source cell described herein produces a fusosome, e.g., recombinant retrovirus, e.g., lentivirus, pseudotyped with the VSV-G glycoprotein.

[0475] A fusosome or pseudotyped virus generally has a modification to one or more of its envelope proteins, e.g., an envelope protein is substituted with an envelope protein from another virus. For example, HIV can be pseudotyped with a fusion protein from rhabdovirus, e.g., vesicular stomatitis virus G-protein (VSV-G) envelope proteins, which allows HIV to infect a wider range of cells because HIV envelope proteins (encoded by the env gene) normally target the virus to CD4+ presenting cells. In some embodiments, lentiviral envelope proteins are pseudotyped with VSV-G. In one embodiment, source cells produce recombinant retrovirus, e.g., lentivirus, pseudotyped with the VSV-G envelope glycoprotein.

[0476] Furthermore, a fusogen or viral envelope protein can be modified or engineered to contain polypeptide sequences that allow the transduction vector to target and infect host cells outside its normal range or more specifically limit transduction to a cell or tissue type. For example, the fusogen or envelope protein can be joined in-frame with targeting sequences, such as receptor ligands, antibodies (using an antigen-binding portion of an antibody or a recombinant antibody-type molecule, such as a single chain antibody), and polypeptide moieties or modifications thereof (e.g., where a glycosylation site is present in the targeting sequence) that, when displayed on the transduction vector coat, facilitate directed delivery of the virion particle to a target cell of interest. Furthermore, envelope proteins can further comprise sequences that modulate cell function. Modulating cell function with a transducing vector may increase or decrease transduction efficiency for certain cell types in a mixed population of cells. For example, stem cells could be transduced more specifically with envelope sequences containing ligands or binding partners that bind specifically to stem cells, rather than other cell types that are found in the blood or bone marrow. Non-limiting examples are stem cell factor (SCF) and Flt-3 ligand. Other examples include, e.g., antibodies (e.g., single-chain antibodies that are specific for a cell-type), and essentially any antigen (including receptors) that binds tissues as lung, liver, pancreas, heart, endothelial, smooth, breast, prostate, epithelial, vascular cancer, etc.

[0477] Protein fusogens or viral envelope protein may be re-targeted by mutating amino acid residues in a fusion protein or a targeting protein (e.g. the hemagglutinin protein). In some embodiments the fusogen is randomly mutated. In some embodiments the fusogen is rationally mutated. In some embodiments the fusogen is subjected to directed evolution. In some embodiments the fusogen is truncated and only a subset of the peptide is used in the retroviral vector or VLP. For example, amino acid residues in the measles hemagglutinin protein may be mutated to alter the binding properties of the protein, redirecting fusion (doi:10.1038/nbt942, Molecular Therapy vol. 16 no. 8, 1427-1436 August 2008, doi:10.1038/nbt1060, DOI: 10.1128/JVI.76.7.3558-3563.2002, DOI: 10.1128/JVI.75.17.8016-8020.2001, doi: 10.1073pnas.0604993103).

[0478] In some embodiments, the protein fusogen or viral envelope protein is re-targeted by i) mutating amino acid resides in the natural fusogen protein sequence or viral envelope protein sequence and/or ii) engineering the fusogen protein or viral envelope protein to contain polypeptide sequences that allow the fusogen or viral envelope protein to target and fuse or infect host cells outside its normal range.

[0479] In some embodiments, the fusosomes comprise one or more fusogens on their exterior surface (e.g., integrated into the cell membrane) to target a specific cell or tissue type. Fusogens include without limitation protein based, lipid based, and chemical based fusogens. The fusogen may bind a partner on a target cells' surface. In some embodiments, the fusosome comprising the fusogen will integrate the membrane into a lipid bilayer of a target cell.

[0480] In some embodiments the fusogen is a paramyxovirus fusogen. In some embodiments the fusogen is a Nipah virus protein F, a measles virus F protein, a tupaia paramyxovirus F protein, a paramyxovirus F protein, a Hendra virus F protein, a Henipavirus F protein, a Morbilivirus F protein, a respirovirus F protein, a Sendai virus F protein, a rubulavirus F protein, or an avulavirus F protein.

[0481] In some embodiments, the fusogen is a poxviridae fusogen.

[0482] Additional exemplary fusogens are disclosed in U.S. Pat. No. 9,695,446, US 2004/0028687, U.S. Pat. Nos. 6,416,997, 7,329,807, US 2017/0112773, US 2009/0202622, WO 2006/027202, and US 2004/0009604, the entire contents of all of which are hereby incorporated by reference.

[0483] In some embodiments, a fusogen described herein comprises an amino acid sequence of Table 1, or an amino acid sequence having at least 80%, 85%, 90%, 95%, 96%, 97%, 98%, or 99% sequence identity thereto, or an amino acid sequence having at least 80%, 85%, 90%, 95%, 96%, 97%, 98%, or 99% sequence identity to a portion of the sequence, e.g., a portion of 100, 200, 300, 400, 500, or 600 amino acids in length. For instance, in some embodiments, a fusogen described herein comprises an amino acid sequence having at least 80% identity to any amino acid sequence of Table 1. In some embodiments, a nucleic acid sequence described herein encodes an amino acid sequence of Table 1, or an amino acid sequence having at least 80%, 85%, 90%, 95%, 96%, 97%, 98%, or 99% sequence identity thereto, or an amino acid sequence having at least 80%, 85%, 90%, 95%, 96%, 97%, 98%, or 99% sequence identity to a portion of the sequence, e.g., a portion of 40, 50, 60, 80, 100, 200, 300, 400, 500, or 600 amino acids in length.

[0484] In some embodiments, a fusogen described herein comprises an amino acid sequence set forth in any one of SEQ ID NOS: 1-57, or an amino acid sequence having at least 80%, 85%, 90%, 95%, 96%, 97%, 98%, or 99% sequence identity thereto, or an amino acid sequence having at least 80%, 85%, 90%, 95%, 96%, 97%, 98%, or 99% sequence identity to a portion of the sequence, e.g., a portion of 100, 200, 300, 400, 500, or 600 amino acids in length. For instance, in some embodiments, a fusogen described herein comprises an amino acid sequence having at least 80% identity to an amino acid sequence set forth in any one of SEQ ID NOS: 1-57. In some embodiments, a nucleic acid sequence described herein encodes an amino acid sequence set forth in any one of SEQ ID NOS: 1-57, or an amino acid sequence having at least 80%, 85%, 90%, 95%, 96%, 97%, 98%, or 99% sequence identity thereto, or an amino acid sequence having at least 80%, 85%, 90%, 95%, 96%, 97%, 98%, or 99% sequence identity to a portion of the sequence, e.g., a portion of 40, 50, 60, 80, 100, 200, 300, 400, 500, or 600 amino acids in length.

TABLE 1
Paramyxovirus F sequence clusters. Column 1, Genbank ID includes the Genbank ID of the whole
genome sequence of the virus that is the centroid sequence of the cluster. Column 2, Nucleotides
of CDS provides the nucleotides corresponding to the CDS of the gene in the whole genome. Column
3, Full Gene Name, provides the full name of the gene including Genbank ID, virus species, strain,
and protein name. Column 4, Sequence, provides the amino acid sequence of the gene. Column 5,
#Sequences/Cluster, provides the number of sequences that cluster with this centroid sequence.

| | | | | #Se- | SEQ |
|---|---|---|---|---|---|
| Genbank | Nucleotides | | | quences/ | ID |
| ID | of CDS | Full Gene Name | Sequence | Cluster | NO |
| KP317927 | 5630-7399 | gb: KP317927: 5630- | MIPQARTELNLGQITMELLIHRSSAIFLTLAI | 993 | 1 |
| | | 7399\|Organism: Human | NALYLTSSQNITEEFYQSTCSAVSRGYLSA | | |
| | | respiratory syncytial | LRTGWYTSVITIELSNIKETKCNGTDTKVK | | |
| | | virus\|Strain | LIKQELDKYKNAVTELQLLMQNTPAANNR | | |
| | | Name: | ARREAPQYMNYTINTTGSLNVSISKKRKRR | | |
| | | Kilifi_9465_7_RSVB_2011\| | FLGFLLGVGSAIASGIAVSKVLHLEGEVNKI | | |
| | | Protein Name: | KNALLSTNKAVVSLSNGVSVLTSKVLDLK | | |
| | | fusion glycoprotein\|Gene | NYINNQLLPIVNQQSCRISNIETVIEFQQKN | | |
| | | Symbol: F | SRLLEITREFSVNAGVTTPLSTYMLTNSELL | | |
| | | | SLINDMPITNDQKKLMSSNVQIVRQQSYSI | | |
| | | | MSIIKEEVLAYVVQLPIYGVIDTPCWKLHT | | |
| | | | SPLCTTNIKEGSNICLTRTDRGWYCDNAGS | | |
| | | | VSFFPQADTCKVQSNRVFCDTMNSLTLPSE | | |
| | | | VSLCNTDIFNSKYDCKIMTSKTDISSSVITSL | | |
| | | | GAIVSCYGKTKCTASNKNRGIIKTFSNGCD | | |
| | | | YVSNKGVDTVSVGNTLYYVNKLEGKNLY | | |
| | | | VKGEPIINYYDPLVFPSDEFDASISQVNEKI | | |
| | | | NQSLAFIRRSDELLHNVNTGKSTTNIMITAI | | |
| | | | IIVIIVVLLSLIAIGLLLYCKAKNTPVTLSKD | | |
| | | | QLSGINNIAFSK | | |
| AB524405 | 4556-6217 | gb: AB524405: 4556- | MDPKPSTSYLHAFPLIFVAISLVFMAGRAS | 418 | 2 |
| | | 6217\|Organism: Newcastle | ALDGRPLAAAGIVVTGDKAVNIYTSSQTG | | |
| | | disease virus\|Strain | TIIIKLLPNMPKDKEQCAKSPLDAYNRTLTT | | |
| | | Name: Goose/ | LLAPLGDSIRRIQESVTTSGGERQERLVGAI | | |
| | | Alaska/415/91\|Protein | IGGVALGVATAAQITAASALIQANQNAANI | | |
| | | Name: fusion | LKLKESIAATNEAVHEVTSGLSQLAVAVG | | |
| | | protein\|Gene | KMQQFVNDQFNKTAQEIDCIKITQQVGVE | | |
| | | Symbol: F | LNLYLTELTTVFGPQITSPALTQLTIQALYN | | |
| | | | LAGGNMDYMLTKLGVGNNQLSSLISSGLIS | | |
| | | | GNPILYDSQTQLLGIQVTLPSVGNLNNMRA | | |
| | | | TYLETLSVSTNKGFASALVPKVVTQVGSVI | | |
| | | | EELDTSYCIETDLDLYCTRIVTFPMSPGIFSC | | |
| | | | LGGNTSACMYSKTEGALTTPYMTLKGSVI | | |
| | | | ANCKMTTCRCADPPGIISQNYGEAVSLIDK | | |
| | | | KVCNILTLDGITLRLSGEFDATYQKNISIQD | | |
| | | | SQVVITGNLDISTELGNVNNSISNALDKLEE | | |
| | | | SNSKLDKVNVRLTSTSALITYIVLTTIALIC | | |
| | | | GIVSLVLACYIMYKQKAQQKTLLWLGNNT | | |
| | | | LDQMRATTKM | | |
| AF266286 | 4875-7247 | gb: AF266286: 4875- | MSIMGLKVNVSAIFMAVLLTLQTPTGQIH | 128 | 3 |
| | | 7247\|Organism: Measles | WGNLSKIGVVGIGSASYKVMTRSSHQSLVI | | |
| | | virus strain | KLMPNITLLNNCTRVEIAEYRRLLRTVLEPI | | |
| | | AIK-C\|Strain | RDALNAMTQNIRPVQSVASSRRHKRFAGV | | |
| | | Name: Measles | VLAGAALGVATAAQITAGIALHQSMLNSQ | | |
| | | virus strain | AIDNLRASLETTNQAIEAIRQAGQEMILAV | | |
| | | Edmonston | QGVQDYINNELIPSMNQLSCDLIGQKLGLK | | |
| | | (AIK-C vaccine)\|Protein | LLRYYTEILSLFGPSLRDPISAEISIQALSYA | | |
| | | Name: fusion | LGGDINKVLEKLGYSGGDLLGILESRGIKA | | |
| | | protein\|Gene | RITHVDTESYFIVLSIAYPTLSEIKGVIVHRL | | |
| | | Symbol: F | EGVSYNIGSQEWYTTVPKYVATQGYLISNF | | |
| | | | DESSCTFMPEGTVCSQNALYPMSPLLQECL | | |
| | | | RGYTKSCARTLVSGSFGNRFILSQGNLIAN | | |
| | | | CASILCKCYTTGTIINQDPDKILTYIAADNC | | |
| | | | PVVEVNGVTIQVGSRRYPDAVYLHRIDLGP | | |
| | | | PILLERLDVGTNLGNAIAKLEDAKELLESS | | |
| | | | DQILRSMKGLSSTCIVYILIAVCLGGLIGIPA | | |
| | | | LICCCRGRCNKKGEQVGMSRPGLKPDLTG | | |
| | | | TSKSYVRSL | | |
| AB503857 | 3068-4687 | gb: AB503857: 3068- | MSWKVVIIFSLLITPQHGLKESYLEESCSTIT | 125 | 4 |
| | | 4687\|Organism: Human | EGYLSVLRTGWYTNVFTLEVGDVENLTCS | | |
| | | metapneumovirus\|Strain | DGPSLIKTELDLTKSALRELKTVSADQLAR | | |
| | | Name: Jpn03-1\|Protein | EEQIEKPRQSRFVLGAIALGVATAAAVTAG | | |
| | | Name: fusion glycoprotein | VAIAKTIRLESEVTAIKNALKTTNEAVSTLG | | |
| | | precursor\|Gene | NGVRVLATAVRELKDFVSKNLTRAINKNK | | |
| | | Symbol: F | CDIDDLKMAVSFSQFNRRFLNVVRQFSDN | | |
| | | | AGITPAISLDLMTDAELARAVSNMPTSAGQ | | |
| | | | IKLMLENRAMVRRKGFGILIGVYGSSVIYM | | |
| | | | VQLPIFGVIDTPCWIVKAAPSCSEKKGNYA | | |
| | | | CLLREDQGWYCQNAGSTVYYPNEKDCET | | |
| | | | RGDHVFCDTAAGINVAEQSKECNINISTTN | | |
| | | | YPCKVSTGRHPISMVALSPLGALVACYKG | | |
| | | | VSCSIGSNRVGIIKQLNKGCSYITNQDADT | | |
| | | | VTIDNTVYQLSKVEGEQHVIKGRPVSSSFD | | |
| | | | PIKFPEDQFNVALDQVFENIENSQALVDQS | | |
| | | | NRILSSAEKGNTGFIIVIILIAVLGSSMILVSI | | |
| | | | FIIIKKTKKPTGAPPELSGVTNNGFIPHS | | |
| EU277658 | 5078-6700 | gb: EU277658: 5078- | MIIIVITMILSLTPSSLCQIDITKLQSVGVLV | 93 | 5 |
| | | 6700\|Organism: Bovine | NSPKGIKISQNFETRYLILSLIPKIEDSHSCG | | |
| | | parainfluenza | NQQIDQYKKLLDRLIIPLYDGLKLQKDVIV | | |
| | | virus 3\|Strain | VNHESHNNTNLRTKRFFGEIIGTIAIGIATSA | | |
| | | Name: Q5592\|Protein | QITAAVALVEAKQARSDIDKLKEAIKDTNK | | |
| | | Name: fusion | AVQSIQSSVGNLIVAVKSVQDYVNNEIVPSI | | |
| | | protein\|Gene | TRLGCEAAGLQLGIALTQHYSELTNIFGDN | | |
| | | Symbol: F | IGTLGEKGVKLQGIASLYRTNITEVFTTSTV | | |
| | | | DQYDIYDLLFTESIKMRVIDVDLSDYSITLQ | | |
| | | | VRLPLLTKVSNTQIYKVDSISYNIQGKEWY | | |
| | | | IPLPHHIMTKGAFLGGADIKECIESFSNYICP | | |
| | | | SDPGFILNHEMENCLSGNITQCPKTIVTSDI | | |
| | | | VPRYAFVDGGVIANCIPTTCTCNGIDNRIN | | |
| | | | QSPDQGIKIITYKECQIVGINGMLFKTNQEG | | |
| | | | TLAKYTFDNIKLNNSVALNPIDISLELNKA | | |
| | | | KSDLEESKRWIEKSNQKLDSIGSWHQSSVT | | |
| | | | IIIIIVMIVVLLIINAIIIMIMIRYLRDRNRHL | | |
| | | | NNKDSEPYVLTNRQ | | |
| AB040874 | 4546-6162 | gb: AB040874: 4546- | MKVFLVTCLGFAVFSSSVCVNINILQQIGYI | 89 | 6 |
| | | 6162\|Organism: Mumps | KQQVRQLSYYSQSSSSYIVVKLLPNIQPTD | | |
| | | virus\|Strain | NSCEFKSVTQYNKTLSNLLLPIAENINNIAS | | |
| | | Name: Miyahara\|Protein | PSSGSRRHKRFAGIAIGIAALGVATAAQVT | | |
| | | Name: fusion | AAVSLVQAQTNARAIAAMKNSIQATNRAV | | |
| | | protein\|Gene | PEVKEGTQRLAIAVQAIQDHINTIMNTQLN | | |
| | | Symbol: F | NMSCQILDNQLATSLGLYLTELTTVFQPQL | | |
| | | | INPALSPISIQALRSLLGSMTPAVVQATLST | | |
| | | | SISAAEILSAGLMEGQIVSVLLDEMQMIVKI | | |
| | | | NIPTIVTQSNALVIDFYSISSFINNQESIIQLP | | |
| | | | DRILEIGNEQWSYPAKNCKLTRHHIFCQYN | | |
| | | | EAERLSLESKLCLAGNISACVFSPIAGSYMR | | |
| | | | RFVALDGTIVANCRSLTCLCKSPSYPIYQPD | | |
| | | | HHAVTTIDLTACQTLSLDGLDFSIVSLSNIT | | |
| | | | YAENLTISLSQTINTQPIDISTELSKVNASLQ | | |
| | | | NAVKYIKESNHQLQSVNVNSKIGAIIVAAL | | |
| | | | VLSILSIIISLLFCCWAYVATKEIRRINFKTN | | |
| | | | HINTISSSVDDLIRY | | |
| AB475097 | 4908-6923 | gb: AB475097: 4908- | MNPHEQTIPMHEKIPKRSKTQTHTQQDLPQ | 46 | 7 |
| | | 6923\|Organism: Canine | QHSTKSAESKTSRARHSITSAQRSTHYDPR | | |
| | | distemper virus\|Strain | TADWPDYYIMKRTRSCKQASYRSDNIPAH | | |
| | | Name: M25CR\|Protein | GDHDGIIHHTPESVSQGAKSRLKMGQSNA | | |
| | | Name: fusion | VKSGSQCTWLVLWCIGVASLFLCSKAQIH | | |
| | | protein\|Gene | WNNLSTIGIIGTDSVHYKIMTRPSHQYLVIK | | |
| | | Symbol: F | LMPNVSLIDNCTKAELDEYEKLLSSILEPIN | | |
| | | | QALTLMTKNVKPLQSVGSGRRQRRFAGV | | |
| | | | VLAGAALGVATAAQITAGIALHQSNLNAQ | | |
| | | | AIQSLRTSLEQSNKAIEEIREATQETVIAVQ | | |
| | | | GVQDYVNNELVPAMQHMSCELVGQRLGL | | |
| | | | KLLRYYTELLSIFGPSLRDPISAEISIQALSY | | |
| | | | ALGGEIHKILEKLGYSGNDMIAILESRGIKT | | |
| | | | KITHVDLPGKFIILSVSYPTLSEVKGVIVHR | | |
| | | | LEAVSYNIGSQEWYTTVPRYVATNGYLISN | | |
| | | | FDESSCVFVSESAICSQNSLYPMSPLLQQCI | | |
| | | | RGDTSSCARTLVSGTMGNKFILSKGNIVAN | | |
| | | | CASILCKCYSTSTIINQSPDKLLTFIASDTCP | | |
| | | | LVEIDGVTIQVGSRQYPDMVYESKVALGP | | |
| | | | AISLERLDVGTNLGNALKKLDDAKVLIDSS | | |
| | | | NQILETVRRSSFNFGSLLSVPILSCTALALLL | | |
| | | | LICCCKRRYQQTHKQNTKVDPTFKPDLTG | | |
| | | | TSRSYVRSL | | |
| AJ849636 | 5526-7166 | gb: AJ849636: 5526- | MTRVAILTFLFLFPNAVACQIHWGNLSKIGI | 34 | 8 |
| | | 7166\|Organism: Peste-des- | VGTGSASYKVMTRPSHQTLVIKLMPNITAI | | |
| | | petits-ruminants | DNCTKSEIAEYKRLLITVLKPVEDALSVITK | | |
| | | virus\|Strain | NVRPIQTLTPGRRTRRFAGAVLAGVALGV | | |
| | | Name: Turkey | ATAAQITAGVALHQSLMNSQAIESLKTSLE | | |
| | | 2000\|Protein | KSNQAIEEIRLANKETILAVQGVQDYINNE | | |
| | | Name: fusion | LVPSVHRMSCELVGHKLGLKLLRYYTEILS | | |
| | | protein\|Gene | IFGPSLRDPIAAEISIQALSYALGGDINRILD | | |
| | | Symbol: F | KLGYSGGDFLAILESKGIKARVTYVDTRDY | | |
| | | | FIILSIAYPTLSEIKGVIVHKIEAITYNIGAQE | | |
| | | | WYTTIPKYVATQGYLISNFDETSCVFTPDG | | |
| | | | TVCSQNALYPMSPLLQECFQGSTKSCARTL | | |
| | | | VSGTISNRFILSKGNLIANCASVLCKCYTTE | | |
| | | | TVISQDPDKLLTVVASDKCPVVEVDGVTIQ | | |
| | | | VGSREYPDSVYLHKIDLGPAISLEKLDVGT | | |
| | | | NLGNAVTRLENAKELLDASDQILKTVKGV | | |
| | | | PFGGNMYIALAACIGVSLGLVTLICCCKGR | | |
| | | | CKNKEVPISKINPGLKPDLTGTSKSYVRSL | | |
| AF017149 | 6618-8258 | gb: AF017149\|Organism: | MATQEVRLKCLLCGIIVLVLSLEGLGILHY | 29 | 9 |
| | | Hendra virus\|Strain | EKLSKIGLVKGITRKYKIKSNPLTKDIVIKM | | |
| | | Name: UNKNOWN- | IPNVSNVSKCTGTVMENYKSRLTGILSPIKG | | |
| | | AF017149\|Protein | AIELYNNNTHDLVGDVKLAGVVMAGIAIG | | |
| | | Name: fusion\|Gene | IATAAQITAGVALYEAMKNADNINKLKSSI | | |
| | | Symbol: F | ESTNEAVVKLQETAEKTVYVLTALQDYIN | | |
| | | | TNLVPTIDQISCKQTELALDLALSKYLSDLL | | |
| | | | FVFGPNLQDPVSNSMTIQAISQAFGGNYET | | |
| | | | LLRTLGYATEDFDDLLESDSIAGQIVYVDL | | |
| | | | SSYYIIVRVYFPILTEIQQAYVQELLPVSFN | | |
| | | | NDNSEWISIVPNFVLIRNTLISNIEVKYCLIT | | |
| | | | KKSVICNQDYATPMTASVRECLTGSTDKC | | |
| | | | PRELVVSSHVPRFALSGGVLFANCISVTCQ | | |
| | | | CQTTGRAISQSGEQTLLMIDNTTCTTVVLG | | |
| | | | NIIISLGKYLGSINYNSESIAVGPPVYTDKV | | |
| | | | DISSQISSMNQSLQQSKDYIKEAQKILDTVN | | |
| | | | PSLISMLSMIILYVLSIAALCIGLITFISFVIV | | |
| | | | EKKRGNYSRLDDRQVRPVSNGDLYYIGT | | |
| AB005795 | 4866-6563 | gb: AB005795: 4866- | MATYIQRVQCISALLSVVLTTLVSCQIPRD | 23 | 10 |
| | | 6563\|Organism: Sendai | RLSNIGVIVDEGKSLKIAGSHESRYIVLSLV | | |
| | | virus\|Strain | PGIDLENGCGTAQVIQYKSLLNRLLIPLRD | | |
| | | Name: Ohita\|Protein | ALDLQEALITVTNDTMTGADVPQSRFFGA | | |
| | | Name: fusion | VIGTIALGVATSAQITAGIALAEAREAKRDI | | |
| | | protein\|Gene | ALIKESMTKTHKSIELLQNAVGEQILALKT | | |
| | | Symbol: F | LQDFVNDEIKPAISELGCETAALRLGIKLTQ | | |
| | | | HYSELLTAFGSNFGTIGEKSLTLQALSSLYS | | |
| | | | ANITEIMTTIRTGQSNIYDVIYTEQIKGTVID | | |
| | | | VDLERYMVTLSVKIPILSEVPGVLIHKASSI | | |
| | | | SYNIDGEEWYVTVPSHILSRASFLGGANIA | | |
| | | | DCVESRLTYICPRDPAQLIPDSQQKCILGDT | | |
| | | | TRCPVTKVVDNIIPKFAFVNGGVVANCIAS | | |
| | | | TCTCGTGRRPISQDRSKGVVFLTHDNCGLI | | |
| | | | GVNGIELYANRKGHDATWGVQNLTVGPAI | | |
| | | | AIRPVDISLNLAAATDFLQDSRAELEKARKI | | |
| | | | LSEVGRWYNSGATLITIIVVMIVVLVVIIVI | | |
| | | | VIVLYRLRRSMLMSNPAGRISRDTYTLEPK | | |
| | | | IRHMYTNGGFDAMTEKR | | |
| AF457102 | 5088-6755 | gb: AF457102\|Organism: | MQKSEILFLVYSSLLLSSSLCQIPVEKLSNV | 21 | 11 |
| | | Human parainfluenza | GVIINEGKLLKIAGSYESRYIVLSLVPSIDLQ | | |
| | | virus 1 strain | DGCGTTQIIQYKNLLNRLLIPLKDALDLQE | | |
| | | Washington/1964\|Strain | SLITITNDTTVTNDNPQTRFFGAVIGTIALG | | |
| | | Name: Washington | VATAAQITAGIALAEAREARKDIALIKDSIV | | |
| | | 1964\|Protein | KTHNSVELIQRGIGEQIIALKTLQDFVNDEI | | |
| | | Name: F | RPAIGELRCETTALKLGIKLTQHYSELATAF | | |
| | | glycoprotein\|Gene | SSNLGTIGEKSLTLQALSSLYSANITEILSTT | | |
| | | Symbol: F | KKDKSDIYDITYTEQVKGTVIDVDLEKYMV | | |
| | | | TLLVKIPILSEIPGVLIYRASSISYNIEGEEW | | |
| | | | HVAIPNYIINKASSLGGADVTNCIESKLAYI | | |
| | | | CPRDPTQLIPDNQQKCILGDVSKCPVTKVI | | |
| | | | NNLVPKFAFINGGVVANCIASTCTCGTNRI | | |
| | | | PVNQDRSRGVTFLTYTNCGLIGINGIELYA | | |
| | | | NKRGRDTTWGNQIIKVGPAVSIRPVDISLN | | |
| | | | LASATNFLEESKTELMKARAIISAVGGWH | | |
| | | | NTESTQIIMIIIVCILIIIICGILYYLYRVRRL | | |
| | | | LVMINSTHNSPVNAYTLESRMRNPYMGNNS | | |
| | | | N | | |
| AB910309 | 4951-6582 | gb: AB910309: 4951- | MGKIRVIIISSLLLSNITTAQVGWDNLTSIG | 12 | 12 |
| | | 6582\|Organism: Feline | VISTKQYDYKITTLNTNQLMVIKMVPNISSI | | |
| | | morbillivirus\|Strain | INCTKPELMKYRELVLGVIRPINESLELMNS | | |
| | | Name: SS1\|Protein | YINMRAGSERFIGAVIAGVALGVATAAQIT | | |
| | | Name: fusion | SGIALHNSIMNKRQIQELRKALSTTNKAIDE | | |
| | | protein\|Gene | IRIAGERTLIAVQGVQDYINNIIIPMQDKLQ | | |
| | | Symbol: F | CDILSSQLAIALLRYYTNILTVFGPSIRDPVT | | |
| | | | SIISIQALSQAFNGNLQALLDGLGYTGRDL | | |
| | | | RDLLESRSITGQIIHADMTDLFLVLRINYPSI | | |
| | | | TEMQGVTIYELNSITYHIGPEEWYTIMPNFI | | |
| | | | AVQGFLTSNFDERKCSITKSSILCQQNSIYP | | |
| | | | MSTEMQRCIKGEIRFCPRSKAVGTLVNRFI | | |
| | | | LTKGNLMANCLGVICRCYSSGQIITQDPSK | | |
| | | | LITIISQEECKEVGVDGIRIMVGPRKLPDVIF | | |
| | | | NARLEVGVPISLSKLDVGTDLAIASAKLNN | | |
| | | | SKALLEQSDKILDSMSKLDSINSRITGLILAI | | |
| | | | MAIFIITVTIIWIIYKRCRNKDNKFSTSIEPLY | | |
| | | | IPPSYNSPHSVVKSI | | |
| KT071755 | 4310-6070 | gb: KT071755: 4310- | MIAALFISLFATCGALDNSVLAPVGIASAQ | 12 | 13 |
| | | 6070\|Organism: Avian | EWQLAAYTNTLSGTIAVRFVPVLPGNLSTC | | |
| | | paramyxovirus 2\|Strain | AQATLAEYNKTVTNILGPLKENLETLLSEP | | |
| | | Name: APMV-2/ | TKTAARFVGAIIGTVALGVATSAQITAAVA | | |
| | | Procarduelisnipalensis/ | LNQAQENARNIWRLKESIRKTNEAVLELK | | |
| | | China/Suiling/53/ | DGLASTAIALDKVQKFINEDIIPQIKEIDCQ | | |
| | | 2013\|Protein | VVANKLGVYLSLYLTELTTIFGAQITNPAL | | |
| | | Name: fusion | TPLSYQALYNLCGGDMGKLTELIGVKAKD | | |
| | | protein\|Gene | INSLYEANLITGQVIGYDSESQIILIQVSYPS | | |
| | | Symbol: F | VSEVTGVRATELVTVSVTTPKGEGRAIAPK | | |
| | | | YVAQSRVVTEELDTSTCRFSKTTLYCRSIIT | | |
| | | | RPLPPLIANCLNGLYQDCQYTTEIGALSSRF | | |
| | | | ITVNGGIIANCRATICKCVNPPKIIVQSDASS | | |
| | | | LTVIDSAICKDVVLDNVQLRLEGKLSAQYF | | |
| | | | TNITIDLSQITTSGSLDISSEIGSINNTVNKVE | | |
| | | | ELIAESNAWLQAVNPHLVNNTSIIVLCVLA | | |
| | | | AIFVVWLVALTGCLAYYIKKSSATRMVGI | | |
| | | | GSSPAGNPYVAQSATKM | | |
| AY029299 | 4598-6265 | gb: AY029299\|Organism: | MGARLGPLAMAPGRYVIIFNLILLHRVVSL | 11 | 14 |
| | | Avian paramyxovirus | DNSRLLQQGIMSATEREIKVYTNSITGSIAV | | |
| | | 6\|Strain | RLIPNLPQEVLKCSAGQIKSYNDTLNRIFTPI | | |
| | | Name: APMV-6/duck/Taiwan/ | KANLERLLATPSMLEDNQNPAPEPRLIGAII | | |
| | | Y1/98\|Protein | GTAALGLATAAQVTAALALNQAQDNAKA | | |
| | | Name: fusion protein\|Gene | ILNLKESITKTNEAVLELKDATGQIAIALDK | | |
| | | Symbol: F | TQRFINDNILPAINNLTCEVAGAKVGVELS | | |
| | | | LYLTELSTVFGSQITNPALSTLSIQALMSLC | | |
| | | | GNDFNYLLNLMGAKHSDLGALYEANLING | | |
| | | | RIIQYDQASQIMVIQVSVPSISSISGLRLTEL | | |
| | | | FTLSIETPVGEGKAVVPQFVVESGQLLEEID | | |
| | | | TQACTLTDTTAYCTIVRTKPLPELVAQCLR | | |
| | | | GDESRCQYTTGIGMLESRFGVFDGLVIANC | | |
| | | | KATICRCLAPEMIITQNKGLPLTVISQETCK | | |
| | | | RILIDGVTLQIEAQVSGSYSRNITVGNSQIA | | |
| | | | PSGPLDISSELGKVNQSLSNVEDLIDQSNQL | | |
| | | | LNRVNPNIVNNTAIIVTIVLLVLLVLWCLA | | |
| | | | LTISILYVSKHAVRMIKTVPNPYVMQAKSP | | |
| | | | GSATQF | | |
| AY141760 | 5028-6665 | gb: AY141760\|Organism: | MTRITILQIILTLTLPVMCQVSFDNLEQVGV | 8 | 15 |
| | | Fer-de-Lance | MFDKPKFLKITGPASTATMIIKLIPTLGTME | | |
| | | paramyxovirus 4\|Strain | SCGTSAVNEYKKTLDTILVPLRDTINKLST | | |
| | | Name: ATCC | DITVVEGTSNISNKREKRFVGIAIAVGAVA | | |
| | | VR-895\|Protein | LATSAQITAGIALSNTIKNAEAIESIKSSIQA | | |
| | | Name: fusion | SNQAIQKVIDAQGRTVTVINGIQDHINSVIN | | |
| | | protein F\|Gene | PALNQLGCDVAKNTLAISLTQYFSKLSLLF | | |
| | | Symbol: F | GPNLRNPVEQPLSVQAIAGLMDGDINAVV | | |
| | | | SQLGYTQSDLLDLLSTESIVGTVTAIDMVN | | |
| | | | YMIQIEMSFPQYITIPDTKVLEGHKITFNDK | | |
| | | | GSEWQTQVPSTIAVRDILIAGVDPDGCSITS | | |
| | | | TSYICKNDPTYAMSEVLTNCFRGNTQECPR | | |
| | | | ARITSTFATRFAIARSTVIANCVAAVCLCG | | |
| | | | DPGIPVVQKAEVTLTAMTLDQCSLITVDGL | | |
| | | | QIKPSKSIANVTANFGNITLGPVVSVGDLD | | |
| | | | LSAELTKVQSDLKEAQDKLDESNAILQGIN | | |
| | | | NKILTAPTSIALIVVSVVVILLIIGMISWLVW | | |
| | | | LTKAVRRSNTRSERVTPSAYNNLGFIK | | |
| EU877976 | 4330-6410 | gb: EU877976: 4330- | MRLSRTILTLILGTLTGYLMGAHSTNVNEG | 8 | 16 |
| | | 6410\|Organism: Avian | PKSEGIRGDLIPGAGIFVTQVRQLQIYQQSG | | |
| | | paramyxovirus 4\|Strain | YHDLVIRLLPLLPAELNDCQREVVTEYNNT | | |
| | | Name: APMV- | VSQLLQPIKTNLDTLLADGGTRDADIQPRFI | | |
| | | 4/KR/YJ/06\|Protein | GAIIATGALAVATVAEVTAAQALSQSKTN | | |
| | | Name: fusion | AQNILKLRDSIQATNQAVFEISQGLEATAT | | |
| | | protein\|Gene | VLSKLQTELNENIIPSLNNLSCAAMGNRLG | | |
| | | Symbol: F | VSLSLYLTLMTTLFGDQITNPVLTPISYSTL | | |
| | | | SAMAGGHIGPVMSKILAGSVTSQLGAEQLI | | |
| | | | ASGLIQSQVVGYDSQYQLLVIRVNLVRIQE | | |
| | | | VQNTRVVSLRTLAVNRDGGLYRAQVPPEV | | |
| | | | VERSGIAERFYADDCVLTTTDYICSSIRSSR | | |
| | | | LNPELVKCLSGALDSCTFERESALLSTPFFV | | |
| | | | YNKAVVANCKAATCRCNKPPSIIAQYSAS | | |
| | | | ALVTITTDTCADLEIEGYRFNIQTESNSWV | | |
| | | | APNFTVSTSQIVSVDPIDISSDIAKINSSIEAA | | |
| | | | REQLELSNQILSRINPRIVNDESLIAIIVTIVV | | |
| | | | LSLLVIGLIVVLGVMYKNLKKVQRAQAAM | | |
| | | | MMQQMSSSQPVTTKLGTPF | | |
| AB176531 | 4793-6448 | gb: AB176531: 4793- | MHHLHPMIVCIFVMYTGIVGSDAIAGDQLL | 7 | 17 |
| | | 6448\|Organism: Human | NIGVIQSKIRSLMYYTDGGASFIVVKLLPNL | | |
| | | parainfluenza | PPSNGTCNITSLDAYNVTLFKLLTPLIENLS | | |
| | | virus 2\|Strain | KISTVTDTKTRQKRFAGVVVGLAALGVAT | | |
| | | Name: Nishio\|Protein | AAQITAAVAIVKANANAAAINNLASSIQST | | |
| | | Name: fusion | NKAVSDVIDASRTIATAVQAIQDRINGAIV | | |
| | | protein\|Gene | NGITSASCRAHDALIGSILNLYLTELTTIFH | | |
| | | Symbol: F | NQITNPALTPLSIQALRILLGSTLPIVIESKLN | | |
| | | | TNFNTAELLSSGLLTGQIISISPMYMQMLIQ | | |
| | | | INVPTFIMQPGAKVIDLIAISANHKLQEVVV | | |
| | | | QVPNRILEYANELQNYPANDCVVTPNSVF | | |
| | | | CRYNEGSPIPESQYQCLRGNLNSCTFTPIIG | | |
| | | | NFLKRFAFANGVLYANCKSLLCRCADPPH | | |
| | | | VVSQDDTQGISIIDIKRCSEMMLDTFSFRITS | | |
| | | | TFNATYVTDFSMINANIVHLSPLDLSNQINS | | |
| | | | INKSLKSAEDWIADSNFFANQARTAKTLYS | | |
| | | | LSAIALILSVITLVVVGLLIAYIIKLVSQIHQF | | |
| | | | RSLAATTMFHRENPAFFSKNNHGNIYGIS | | |
| BK005918 | 4677-6302 | gb: BK005918\|Organism: | MPQQQVAHTCVMLWGIISTVSGINTEALS | 7 | 18 |
| | | Porcinerubula | QYGVVVTNVRQLTYYTQAGSTYLAVRLLP | | |
| | | virus\|Strain | SLASPDQSCALHSIINYNATLQAILSPIAENL | | |
| | | Name: UNKNOWN- | NLISTALREQHRKKRFAGVAIGLTALGVAT | | |
| | | BK005918\|Protein | AAQATAAVALVRANKNAEKVEQLSQALG | | |
| | | Name: fusion | ETNAAISDLIDATKNLGFAVQAIQNQINTAI | | |
| | | protein\|Gene | LPQIHNLSCQVIDAQLGNILSLYLTELTTVF | | |
| | | Symbol: F | QPQLTNPALSPLTIQALRAVLGTTLPALLSE | | |
| | | | KLKSNIPLGDLMSSGLLKGQLVGLNLQNM | | |
| | | | LMIIELYIPTLSTHSTAKVLDLVTISSHVNG | | |
| | | | REVEIQVPNRVLELGSEVLGYGGSECALT | | |
| | | | MSHILCPFNDARVLSTDMKYCLQGNITHCI | | |
| | | | FSPVVGSFLRRFALVNGVVIANCADMSCV | | |
| | | | CFDPQEIIYQNFQEPTTVIDIKKCGKVQLDT | | |
| | | | LTFTISTFANRTYGPPAYVPPDNIIQSEPLDI | | |
| | | | SGNLIAVNNSLSSALNHLATSEILRNEQIWT | | |
| | | | SSLGISTIVALVIIGILIICLVVTWAALWALL | | |
| | | | KEVRGLNSAVNSQLSSYVMGDKFIRY | | |
| KC237063 | 4530-6185 | gb: KC237063: 4530- | MGTRIQFLMVSCLLAGTGSLDPAALMQIG | 7 | 19 |
| | | 6185\|Organism: | VIPTNVRQLMYYTEASSAFIVVKLMPTIDS | | |
| | | Parainfluenza | PISGCNITSISSYNATMTKLLQPIGENLETIR | | |
| | | virus 5\|Strain | YQLIPTRRRRRFVGVVIGLAALGVATAAQ | | |
| | | Name: 08-1990\|Protein | VTAAVALVKANKNAAAILNLKNAIQKTNA | | |
| | | Name: fusion protein\|Gene | AVADVVQATQSLGTAVQAVQDHINSVVSP | | |
| | | Symbol: F\|Segment: 4 | AITAANCKAQDAIIGSILNLYLTELTTIFHN | | |
| | | | QITNPALSPITIQALRILLGSTLPTVVRKSFN | | |
| | | | TQISAAELLSSGLLTGQIVGLDLTYMQMVI | | |
| | | | KIELPTLTVQPATQIIDLVTISAFINNREVMA | | |
| | | | QLPTRIIVTGSLIQAYPASQCTITPNTVYCR | | |
| | | | YNDAQVLSDDTMACLQGNLTRCTFSPVVG | | |
| | | | SFLTRFVLFDGIVYANCRSMLCKCMQPAA | | |
| | | | VILQPSSSPVTVIDMHKCVSLQLDNLRFTIT | | |
| | | | QLANITYNSTIKLETSQILPIDPLDISQNLAA | | |
| | | | VNKSLSDALQHLAQSDTYLSAITSATTTSV | | |
| | | | LSIIAICLGSLGLILIILISVVVWKLLTIVAAN | | |
| | | | RNRMENFVYHNSAFHHSRSDLSEKNQPAT | | |
| | | | LGTR | | |
| AY729016 | 5862-7523 | gb: AY729016: 5862- | MIPGRIFLVLLVIFNTKPIHPNTLTEKFYEST | 6 | 20 |
| | | 7523\|Organism: Murine | CSVETAGYKSALRTGWHMTVMSIKLSQINI | | |
| | | pneumonia virus\|Strain | ESCKSSNSLLAHELAIYSSAVDELRTLSSNA | | |
| | | Name: 15; ATCC VR- | LKSKRKKRFLGLILGLGAAVTAGVALAKT | | |
| | | 25\|Protein | VQLESEIALIRDAVRNTNEAVVSLTNGMSV | | |
| | | Name: fusion | LAKVVDDLKNFISKELLPKINRVSCDVHDI | | |
| | | glycoprotein | TAVIRFQQLNKRLLEVSREFSSNAGLTHTV | | |
| | | precursor\|Gene | SSFMLTDRELTSIVGGMAVSAGQKEIMLSS | | |
| | | Symbol: F | KAIMRRNGLAILSSVNADTLVYVIQLPLFG | | |
| | | | VMDTDCWVIRSSIDCHNIADKYACLARAD | | |
| | | | NGWYCHNAGSLSYFPSPTDCEIHNGYAFC | | |
| | | | DTLKSLTVPVTSRECNSNMYTTNYDCKIST | | |
| | | | SKTYVSTAVLTTMGCLVSCYGHNSCTVIN | | |
| | | | NDKGIIRTLPDGCHYISNKGVDRVQVGNT | | |
| | | | VYYLSKEVGKSIVVRGEPLVLKYDPLSFPD | | |
| | | | DKFDVAIRDVEHSINQTRTFLKASDQLLDL | | |
| | | | SENRENKNLNKSYILTTLLFVVMLIIIMAVI | | |
| | | | GFILYKVLKMIRDNKLKSKSTPGLTVLS | | |
| AB543336 | 5174-6805 | gb: AB543336: 5174- | MGVKGLSLIMIGLLISPITNLDITHLMNLGT | 5 | 21 |
| | | 6805\|Organism: Human | VPTAIRSLVYYTYTKPSYLTVDLIPNLKNL | | |
| | | parainfluenza | DQNCNYSSLNYYNKTALSLIQPIADNINRL | | |
| | | virus 4a\|Strain | TKPITSSEIQSRFFGAVIGTIALGVATAAQV | | |
| | | Name: M-25\|Protein | TAAIGLAKAQENAKLILTLKKAATETNEA | | |
| | | Name: fusion | VRDLANSNKIVVKMISAIQNQINTIIQPAID | | |
| | | protein\|Gene Symbol: F | QINCQIKDLQVANILNLYLTEITTVFHNQLT | | |
| | | | NPALESISIQALKSLLGPTLPEVLSKLDLNNI | | |
| | | | SAASVMASGLIKGQIIAVDIPTMTLVLMVQ | | |
| | | | IPSISPLRQAKIIDLTSITIHTNSQEVQAVVPA | | |
| | | | RFLEIGSEILGFDGSVCQITKDTIFCPYNDA | | |
| | | | YELPIQQKRCLQGQTRDCVFTPVAGTFPRR | | |
| | | | FLTTYGTIVANCRDLVCSCLRPPQIIYQPDE | | |
| | | | NPVTIIDKDLCTTLTLDSITIEIQKSINSTFRR | | |
| | | | EVVLESTQVRSLTPLDLSTDLNQYNQLLKS | | |
| | | | AEDHIQRSTDYLNSINPSIVNNNAIIILIILCIL | | |
| | | | LILTVTICIIWLKYLTKEVKNVARNQRLNR | | |
| | | | DADLFYKIPSQIPVPR | | |
| AF298895 | 4834-6450 | gb: AF298895\|Organism: | MRIALTAVIVSIHFDLAFPMNKNSLLSVGL | 5 | 22 |
| | | Tioman virus\|Strain | VHKSVKNLYFYSQGSPSYIVVKLVPTLGN | | |
| | | Name: UNKNOWN- | VPGNCTLNSLVRYKSTVSSLLSPLAENLEY | | |
| | | AF298895\|Protein | LQKTLTVSRGGRRRRFAGVAIGLAALGVA | | |
| | | Name: fusion | AAAQATAAVALVEARQNAAQIQSLSEAIQ | | |
| | | protein\|Gene | NTNLAVNELKTAIGASATAIQAIQTQINEVI | | |
| | | Symbol: F | NPAINRLSCEILDAQLASMLNLYLIHLTTVF | | |
| | | | QNQLTNPALTPLSIQSLQSLLQGTSSVLTNI | | |
| | | | TSSSKLALNDALVTGLITGQVVGLNMTSL | | |
| | | | QIVIAAYVPSVAKLSNAVVHNFIRITTSVNG | | |
| | | | TEVIIQSPTIIMEQNEVMYDLKTGHCTESDL | | |
| | | | NIYCPYVDAQLLSPGMTNCINGRLNDCTFS | | |
| | | | KVVGSFPTRFAAVEGAILANCKYLQCNCL | | |
| | | | TPPYIITPLNGEMISMIDLSKCQRLDLGTIVF | | |
| | | | DINNPVNVTFNGNYRADVGQMIVTNPLDIS | | |
| | | | AELNQINTSLSNAQGFLSKSDAWLHVSQW | | |
| | | | VTNSGTIFIILIIGLIVGIVYMIINTYVVVQIIK | | |
| | | | EINRMRTSDRAHLLKGSISSIST | | |
| FJ215863 | 4499-6130 | gb: FJ215863: | MGQISVYLINSVLLLLVYPVNSIDNTLIAPI | 5 | 23 |
| | | 4499-6130\|Organism: | GVASANEWQLAAYTTSLSGTIAVRFLPVLP | | |
| | | Avian paramyxovirus | DNMTTCLRETITTYNNTVNNILGPLKSNLD | | |
| | | 8\|Strain | ALLSSETYPQTRLIGAVIGSIALGVATSAQI | | |
| | | Name: goose/Delaware/ | TAAVALKQAQDNARNILALKEALSKTNEA | | |
| | | 1053/76\|Protein | VKELSSGLQQTAIALGKIQSFVNEEILPSIN | | |
| | | Name: fusion | QLSCEVTANKLGVYLSLYLTELTTIFGAQL | | |
| | | protein\|Gene | TNPALTSLSYQALYNLCGGNMAMLTQKIG | | |
| | | Symbol: F | IKQQDVNSLYEAGLITGQVIGYDSQYQLLV | | |
| | | | IQVNYPSISEVTGVRATELVTVSVTTDKGE | | |
| | | | GKAIVPQFVAESRVTIEELDVASCKFSSTTL | | |
| | | | YCRQVNTRALPPLVASCLRGNYDDCQYTT | | |
| | | | EIGALSSRYITLDGGVLVNCKSIVCRCLNPS | | |
| | | | KIISQNTNAAVTYVDATICKTIQLDDIQLQL | | |
| | | | EGSLSSVYARNISIEISQVTTSGSLDISSEIGN | | |
| | | | INNTVNRVEDLIHQSEEWLAKVNPHIVNNT | | |
| | | | TLIVLCVLSALAVIWLAVLTAIIIYLRTKLK | | |
| | | | TISALAVTNTIQSNPYVNQTKRESKF | | |
| JN689227 | 4689-6521 | gb: JN689227: | MKLSVVYTTLLVSTFYSDLARSQLALSELT | 5 | 24 |
| | | 4689-6521\|Organism: | KIGVIPGRSYDLKISTQASYQYMVVKLIPN | | |
| | | Tailam virus\|Strain | LTGLNNCTNGTIEAYKKMLNRLLSPIDAAL | | |
| | | Name: TL8K\|Protein | RKMKDAVNDKPPESVGNVKFWGAVIGGV | | |
| | | Name: fusion | ALGVATSAQITAGVALHNSIQNANAILALK | | |
| | | protein\|Gene | DSIRQSNKAIQELQTAMSTTVVVLNALQD | | |
| | | Symbol: F | QINNQLVPAINSLGCQVVANTLGLKLNQY | | |
| | | | FSEISLVFGPNLRDPTSETLSIQALSRAFNG | | |
| | | | DFDSMLSKLKYDDSDFLDLLESDSIRGRIID | | |
| | | | VSLSDYLITIQIEYPALLSIKDAVIQTFNLISY | | |
| | | | NTRGTEWISIFPKQLLVRGTYISNIDISQCVI | | |
| | | | AATSIICKSDTSTPISSATWSCATGNITNCA | | |
| | | | RTRVVNAHVPRFALYGGVVFANCAPVVC | | |
| | | | KCQDPLYSINQEPKVTNVMVDVDACKEM | | |
| | | | YLDGLYITLGKTQISRAMYAEDVSLGGPIS | | |
| | | | VDPIDLGNEINSINSAINRSEEHLNHANELL | | |
| | | | DKVNPRIVNVKTFGVMIGLLVLVVLWCVI | | |
| | | | TLVWLICLTKQLARTAYAGSMGSRASTVN | | |
| | | | SLSGFVG | | |
| JX857409 | 4831-6615 | gb: JX857409: | MQVTTLRPAIILSIALLVTGQVPRDKLANL | 5 | 25 |
| | | 4831-6615\|Organism: | GIIIKDSKALKIAGSYENRYIVLSLVPTIDNV | | |
| | | Porcine | NGCGSIQIAKYKEMLERLLIPIKDALDLQES | | |
| | | parainfluenza | LIVIDNETVNNNYSPQYRFVGAIIGTIALGV | | |
| | | virus 1\|Strain | ATAAQVTAGVALMEAREAKRDISMLKEAI | | |
| | | Name: S206N\|Protein | EKTQNSIEKLQNSAGEQILALKMLQDYVN | | |
| | | Name: fusion | GEIKPAIEELGCETAALKLGIALTQHYTELT | | |
| | | protein\|Gene | NAFGSNLGSIGEKSLTLQALSSLYKTNITNI | | |
| | | Symbol: F | LTATNLGKTDIYDIIYAEQVKGRVIDVDLK | | |
| | | | RYMVTISVKIPILSEIPGVLIYEVSSISYNIDG | | |
| | | | AEWYAAVPDHILSKSAYIGGADISDCIESR | | |
| | | | LTYICPQDPAQIIADNQQQCFFGHLDKCPIT | | |
| | | | KVIDNLVPKFAFINGGVVANCIASTCTCGE | | |
| | | | ERIQVSQDRNKGVTFLTHNNCGLIGINGIEF | | |
| | | | HANKKGSDATWNVSPIGVGPAVSLRPVDI | | |
| | | | SLQIVAATNFLNSSRKDLMKAKEILNQVG | | |
| | | | NLKDLTTITIINIVIIIILLICVIGLGILYHQL | | |
| | | | RSALGMRDKMSVLNNSSYSLEPRTAQVQVIK | | |
| | | | PTSFMG | | |
| AY640317 | 2932-4571 | gb: AY640317: | MDVRICLLLFLISNPSSCIQETYNEESCSTVT | 4 | 26 |
| | | 2932-4571\|Organism: | RGYKSVLRTGWYTNVFNLEIGNVENITCN | | |
| | | Avian | DGPSLIDTELVLTKNALRELKTVSADQVAK | | |
| | | metapneumovirus\| | ESRLSSPRRRRFVLGAIALGVATAAAVTAG | | |
| | | Strain | VALAKTIRLEGEVKAIKNALRNTNEAVSTL | | |
| | | Name: LAHA\|Protein | GNGVRVLATAVNDLKEFISKKLTPAINQN | | |
| | | Name: F\|Gene | KCNIADIKMAISFGQNNRRFLNVVRQFSDS | | |
| | | Symbol: F | AGITSAVSLDLMTDDELVRAINRMPTSSGQ | | |
| | | | ISLMLNNRAMVRRKGFGILIGVYDGTVVY | | |
| | | | MVQLPIFGVIETPCWRVVAAPLCRKRRGN | | |
| | | | YACILREDQGWYCTNAGSTAYYPNKDDC | | |
| | | | EVRDDYVFCDTAAGINVALEVDQCNYNIS | | |
| | | | TSKYPCKVSTGRHPVSMVALTPLGGLVSC | | |
| | | | YESVSCSIGSNKVGIIKQLGKGCTHIPNNEA | | |
| | | | DTITIDNTVYQLSKVVGEQRTIKGAPVVNN | | |
| | | | FNPILFPVDQFNVALDQVFESIDRSQDLIDK | | |
| | | | SNDLLGADAKSKAGIAIAIVVLVILGIFFLL | | |
| | | | AVIYYCSRVRKTKPKHDYPATTGHSSMAY | | |
| | | | VS | | |
| KU646513 | 4641-6498 | gb: KU646513: | MARFSWEIFRLSTILLIAQTCQGSIDGRLTL | 4 | 27 |
| | | 4641-6498\|Organism: | AAGIVPVGDRPISIYTSSQTGIIVVKLIPNLP | | |
| | | Avian | DNKKDCAKQSLQSYNETLSRILTPLATAMS | | |
| | | paramyxovirus 13 | AIRGNSTTQVRENRLVGAIIGSVALGVATA | | |
| | | goose/Kazakhstan/ | AQITAATALIQANQNAANIARLANSIAKTN | | |
| | | 5751/2013\|Strain | EAVTDLTEGLGTLAIGVGKLQDYVNEQFN | | |
| | | Name: APMV-13/white | NTAVAIDCLTLESRLGIQLSLYLTELMGVF | | |
| | | fronted goose/Northern | GNQLTSPALTPITIQALYNLAGGNLNALLS | | |
| | | Kazakhstan/5751/ | RLGASETQLGSLINSGLIKGMPIMYDDANK | | |
| | | 2013\|Protein | LLAVQVELPSIGKLNGARSTLLETLAVDTT | | |
| | | Name: fusion | RGPSSPIIPSAVIEIGGAMEELDLSPCITTDL | | |
| | | protein\|Gene Symbol: F | DMFCTKIISYPLSQSTLSCLNGNLSDCVFSR | | |
| | | | SEGVLSTPYMTIKGKIVANCKQVICRCMDP | | |
| | | | PQILSQNYGEALLLIDENTCRSLELSGVILK | | |
| | | | LAGTYESEYTRNLTVDPSQVIITGPLDISAE | | |
| | | | LSKVNQSIDSAKENIAESNKFLSQVNVKLL | | |
| | | | SSSAMITYIVATVVCLIIAITGCVIGIYTLTK | | |
| | | | LKSQQKTLLWLGNNAEMHGSRSKTSF | | |
| AF326114 | 4818-6482 | gb: AF326114\|Organism: | MMPRVLGMIVLYLTHSQILCINRNTLYQIG | 3 | 28 |
| | | Menangle virus\|Strain | LIHRSVKKVNFYSQGSPSYIVVKLVPTLAAI | | |
| | | Name: UNKNOWN- | PPNCSIKSLQRYKETVTSLVQPISDNLGYLQ | | |
| | | AF326114\|Protein | DKLVTGQSRRRRRFAGVAIGLAALGVAAA | | |
| | | Name: fusion | AQATAAVALVETRENAGKIQALSESIQNTN | | |
| | | protein\|Gene | QAVHSLKTALGFSATAIQAIQNQVNEVINP | | |
| | | Symbol: F | AINKLSCEVLDSQLASMLNLYLIHLTTVFQ | | |
| | | | TQLTNPALTPLSIQALTSVLQGTSGVLMNS | | |
| | | | TNSTLTQPIDLLATGLITGQIISVNMTSLQLI | | |
| | | | IATFMPSIAELPNAVLHSFFRITTSVNLTEV | | |
| | | | MIQSPEFIMEQNGVFYDFNTAHCQLGDNN | | |
| | | | VYCPYIDAARLSSMMTNCINGNLGECVFS | | |
| | | | RVIGSFPSRFVSLNGAILANCKFMRCNCLSP | | |
| | | | EKIITPLDGEMISLIDLRVCQKLTLGTITFEIS | | |
| | | | QPVNVSFQGGFVANAGQIIVTNPFDISAEL | | |
| | | | GQINNSLNDAQGFLDQSNNWLKVSGWINN | | |
| | | | SGSLFIAGIVVIGLIVLCIVIIIYINVQIIREVN | | |
| | | | RLRSFIYRDYVLDHDKAPYSPESSSPHRKS | | |
| | | | LKTVS | | |
| GU206351 | 5441-7468 | gb: GU206351: | MLQLPLTILLSILSAHQSLCLDNSKLIHAGI | 3 | 29 |
| | | 5441-7468\|Organism: | MSTTEREVNVYAQSITGSIVVRLIPNIPSNH | | |
| | | Avian paramyxovirus | KSCATSQIKLYNDTLTRLLTPIKANLEGLIS | | |
| | | 5\|Strain | AVSQDQSQNSGKRKKRFVGAVIGAAALGL | | |
| | | Name: budgerigar/ | ATAAQVTATVALNQAQENARNILRLKNSI | | |
| | | Kunitachi/74\|Protein | QKTNEAVMELKDAVGQTAVAIDKTQAFIN | | |
| | | Name: fusion | NQILPAISNLSCEVLGNKIGVQLSLYLTELT | | |
| | | protein\|Gene | TVFGNQLTNPALTTLSLQALYNLCGDDFN | | |
| | | Symbol: F | YLINLLNAKNRNLASLYEANLIQGRITQYD | | |
| | | | SMNQLLIIQVQIPSISTVSGMRVTELFTLSV | | |
| | | | DTPIGEGKALVPKYVLSSGRIMEEVDLSSC | | |
| | | | AITSTSVFCSSIISRPLPLETINCLNGNVTQC | | |
| | | | QFTANTGTLESRYAVIGGLVIANCKAIVCR | | |
| | | | CLNPPGVIAQNLGLPITIISSNTCQRINLEQIT | | |
| | | | LSLGNSILSTYSANLSQVEMNLAPSNPLDIS | | |
| | | | VELNRVNTSLSKVESLIKESNSILDSVNPQI | | |
| | | | LNVKTVIILAVIIGLIVVWCFILTCLIVRGFM | | |
| | | | LLVKQQKFKGLSVQNNPYVSNNSH | | |
| JQ001776 | 6129-8166 | gb: JQ001776: | MSNKRTTVLIIISYTLFYLNNAAIVGFDFDK | 3 | 30 |
| | | 6129-8166\|Organism: | LNKIGVVQGRVLNYKIKGDPMTKDLVLKF | | |
| | | Cedar virus\|Strain | IPNIVNITECVREPLSRYNETVRRLLLPIHN | | |
| | | Name: CG1a\|Protein | MLGLYLNNTNAKMTGLMIAGVIMGGIAIG | | |
| | | Name: fusion | IATAAQITAGFALYEAKKNTENIQKLTDSI | | |
| | | glycoprotein\|Gene | MKTQDSIDKLTDSVGTSILILNKLQTYINNQ | | |
| | | Symbol: F | LVPNLELLSCRQNKIEFDLMLTKYLVDLM | | |
| | | | TVIGPNINNPVNKDMTIQSLSLLFDGNYDI | | |
| | | | MMSELGYTPQDFLDLIESKSITGQIIYVDME | | |
| | | | NLYVVIRTYLPTLIEVPDAQIYEFNKITMSS | | |
| | | | NGGEYLSTIPNFILIRGNYMSNIDVATCYM | | |
| | | | TKASVICNQDYSLPMSQNLRSCYQGETEY | | |
| | | | CPVEAVIASHSPRFALTNGVIFANCINTICR | | |
| | | | CQDNGKTITQNINQFVSMIDNSTCNDVMV | | |
| | | | DKFTIKVGKYMGRKDINNINIQIGPQIIIDK | | |
| | | | VDLSNEINKMNQSLKDSIFYLREAKRILDS | | |
| | | | VNISLISPSVQLFLIIISVLSFIILLIIIVYLY | | |
| | | | CKSKHSYKYNKFIDDPDYYNDYKRERINGKA | | |
| | | | SKSNNIYYVGD | | |
| LC168749 | 4869-7235 | gb: LC168749: | MGILFAALLAMTNPHLATGQIHWGNLSKI | 2 | 31 |
| | | 4869-7235\|Organism: | GVVGTGSASYKVMTQSSHQSLVIKLMPNV | | |
| | | Rinderpest | TAIDNCTKTEIMEYKRLLGTVLKPIREALN | | |
| | | morbillivirus\|Strain | AITKNIKPIQSSTTSRRHKRFAGVVLAGAA | | |
| | | Name: Lv\|Protein | LGVATAAQITAGIALHQSMMNSQAIESLK | | |
| | | Name: F | ASLETTNQAIEEIRQAGQEMVLAVQGVQD | | |
| | | protein\|Gene | YINNELVPAMGQLSCEIVGQKLGLKLLRY | | |
| | | Symbol: F | YTEILSLFGPSLRDPVSAELSIQALSYALGG | | |
| | | | DINKILEKLGYSGSDLLAILESKGIKAKITY | | |
| | | | VDIESYFIVLSIAYPSLSEIKGVIVHRLESVS | | |
| | | | YNIGSQEWYTTVPRYVATQGYLISNFDDTP | | |
| | | | CAFTPEGTICSQNALYPMSPLLQECFRGST | | |
| | | | RSCARTLVSGSIGNRFILSKGNLIANCASIL | | |
| | | | CKCYTTGSIISQDPDKILTYIAADQCPVVEV | | |
| | | | GGVTIQVGSREYSDAVYLHEIDLGPPISLEK | | |
| | | | LDVGTNLWNAVTKLEKAKDLLDSSDLILE | | |
| | | | NIKGVSVTNTGYILVGVGLIAVVGILIITCC | | |
| | | | CKKRRSDNKVSTMVLNPGLRPDLTGTSKS | | |
| | | | YVRSL | | |
| LC187310 | 6250-7860 | gb: LC187310: | MTRTRLLFLLTCYIPGAVSLDNSILAPAGIIS | 2 | 32 |
| | | 6250-7860\|Organism: | ASERQIAIYTQTLQGTIALRFIPVLPQNLSSC | | |
| | | Avian paramyxovirus | AKDTLESYNSTVSNLLLPIAENLNALLKDA | | |
| | | 10\|Strain | DKPSQRIIGAIIGSVALGVATTAQVTAALA | | |
| | | Name: rAPMV-10- | MTQAQQNARNIWKLKESIKNTNQAVLELK | | |
| | | FI324/YmHA\|Protein | DGLQQSAIALDKVQSFINSEILPQINQLGCE | | |
| | | Name: fusion | VAANKLGIFLSLYLTEITTVFKNQITNPALS | | |
| | | protein\|Gene | TLSYQALYNLCGGNMAALTKQIGIKDTEIN | | |
| | | Symbol: F | SLYEAELITGQVIGYDSADQILLIQVSYPSV | | |
| | | | SRVQGVRAVELLTVSVATPKGEGKAIAPSF | | |
| | | | IAQSNIIAEELDTQPCKFSKTTLYCRQVNTR | | |
| | | | TLPVRVANCLKGKYNDCQYTTEIGALASR | | |
| | | | YVTITNGVVANCRSIICRCLDPEGIVAQNSD | | |
| | | | AAITVIDRSTCKLIQLGDITLRLEGKLSSSYS | | |
| | | | KNITIDISQVTTSGSLDISSELGSINNTITKVE | | |
| | | | DLISKSNDWLSKVNPTLISNDTIIALCVIAGI | | |
| | | | VVIWLVIITILSYYILIKLKNVALLSTMPKK | | |
| | | | DLNPYVNNTKF | | |
| NC_005283 | 5277-6935 | gb: NC_005283: | MAASNGGVMYQSFLTIIILVIMTEGQIHWG | 2 | 33 |
| | | 5277-6935\|Organism: | NLSKIGIVGTGSASYKVMTRPNHQYLVIKL | | |
| | | Dolphin | MPNVTMIDNCTRTEVTEYRKLLKTVLEPV | | |
| | | morbillivirus\|Strain | KNALTVITKNIKPIQSLTTSRRSKRFAGVVL | | |
| | | Name: UNKNOWN- | AGVALGVATAAQITAGVALHQSIMNSQSI | | |
| | | NC_005283\|Protein | DNLRTSLEKSNQAIEEIRQASQETVLAVQG | | |
| | | Name: fusion | VQDFINNELIPSMHQLSCEMLGQKLGLKLL | | |
| | | protein\|Gene | RYYTEILSIFGPSLRDPVSAEISIQALSYALG | | |
| | | Symbol: F | GDINKILEKLGYSGADLLAILESRGIKAKVT | | |
| | | | HVDLEGYFIVLSIAYPTLSEVKGVIVHKLE | | |
| | | | AVSYNLGSQEWYTTLPKYVATNGYLISNF | | |
| | | | DESSCAFMSEVTICSQNALYPMSPLLQQCL | | |
| | | | RGSTASCARSLVSGTIGNRFILSKGNLIANC | | |
| | | | ASVLCKCYSTGTIISQDPDKLLTFVAADKC | | |
| | | | PLVEVDGITIQVGSREYPDSVYVSRIDLGPA | | |
| | | | ISLEKLDVGTNLGSALTKLDNAKDLLDSSN | | |
| | | | QILENVRRSSFGGAMYIGILVCAGALVILC | | |
| | | | VLVYCCRRHCRKRVQTPPKATPGLKPDLT | | |
| | | | GTTKSYVRSL | | |
| NC_005339 | 5374-7602 | gb: NC_005339: | MSNYFPARVIIIVSLITAVSCQISFQNLSTIG | 2 | 34 |
| | | 5374-7602\|Organism: | VFKFKEYDYRVSGDYNEQFLAIKMVPNVT | | |
| | | Mossman virus\|Strain | GVENCTASLIDEYRHVIYNLLQPINTTLTAS | | |
| | | Name: UNKNOWN- | TSNVDPYAGNKKFFGAVIAGVALGVATAA | | |
| | | NC_005339\|Protein | QVTAGVALYEARQNAAAIAEIKESLHYTH | | |
| | | Name: fusion | KAIESLQISQKQTVVAIQGIQDQINTNIIPQI | | |
| | | protein\|Gene | NALTCEIANQRLRLMLLQYYTEMLSSFGPII | | |
| | | Symbol: F | QDPLSGHITVQALSQAAGGNITGLMRELG | | |
| | | | YSSKDLRYILSVNGISANIIDADPEIGSIILRI | | |
| | | | RYPSMIKIPDVAVMELSYLAYHAAGGDWL | | |
| | | | TVGPRFILKRGYSLSNLDITSCTIGEDFLLCS | | |
| | | | KDVSSPMSLATQSCLRGDTQMCSRTAVQD | | |
| | | | REAPRFLLLQGNLIVNCMSVNCKCEDPEET | | |
| | | | ITQDPAYPLMVLGSDTCKIHYIDGIRIKLGK | | |
| | | | VQLPPITVLNTLSLGPIVVLNPIDVSNQLSL | | |
| | | | VETTVKESEDHLKNAIGALRSQSRVGGVGI | | |
| | | | VAIVGLIIATVSLVVLVISGCCLVKYFSRTA | | |
| | | | TLESSLTTIEHGPTLAPKSGPIIPTYINPVYR | | |
| | | | HD | | |
| NC_007454 | 4635-6384 | gb: NC_007454: | MKPVALIYLTILAFTVKVRSQLALSDLTKI | 2 | 35 |
| | | 4635-6384\|Organism: | GIIPAKSYELKISTQAAQQLMVIKLIPNVNG | | |
| | | J-virus\|Strain | LTNCTIPVMDSYKKMLDRILKPIDDALNHV | | |
| | | Name: UNKNOWN- | KNAIQDKQGDGVPGVRFWGAIIGGVALGV | | |
| | | NC_007454\|Protein | ATSAQITAGVALHNSIQNANAILQLKESIRN | | |
| | | Name: fusion | SNKAIEELQAGLQSTVLVINALQDQINSQL | | |
| | | protein\|Gene | VPAINTLGCSVIANTLGLRLNQYFSEISLVF | | |
| | | Symbol: F | GPNLRDPTSQTLSIQAIAKAFNGDFDSMMK | | |
| | | | KMHYTDSDFLDLLESDSIRGRIISVSLEDYL | | |
| | | | IIIQIDYPGLTTIPNSVVQTFNLITYNYKGTE | | |
| | | | WESIFPRELLIRGSYISNIDISQCVGTSKSMI | | |
| | | | CKSDTSTTISPATWACATGNLTSCARTRVV | | |
| | | | NSHSTRFALSGGVLFANCAPIACRCQDPQY | | |
| | | | SINQEPKTTNVMVTSEDCKELYIDGFYLTL | | |
| | | | GKKMLDRAMYAEDVALGGSVSVDPIDIGN | | |
| | | | ELNSINESINKSHEYLDKANELLEQVNPNIV | | |
| | | | NVSSFSFILVISILLIIWFIVTLVWLIYLTKH | | |
| | | | MNFIVGKVAMGSRSSTVNSLSGFVG | | |
| NC_009489 | 4620-6500 | gb: NC_009489: | MRSSLFLVLTLLVPFAHSIDSITLEQYGTVI | 2 | 36 |
| | | 4620-6500\|Organism: | TSVRSLAYFLETNPTYISVRLMPAIQTDSSH | | |
| | | Mapuera virus\|Strain | CSYHSIENYNLTLTKLLLPLQENLHQITDSL | | |
| | | Name: BeAnn 370284\|Protein | SSRRRKKRFAGVAVGLAALGVATAAQVT | | |
| | | Name: fusion | AAIAVVKAKENSAKIAQLTSAISETNRAVQ | | |
| | | protein\|Gene | DLIEGSKQLAVAVQAIQDQINNVIQPQLTN | | |
| | | Symbol: F | LSCQVADAQVGTILNMYLTELTTVFHPQIT | | |
| | | | NSALTPITIQALRSLLGSTLPQVVTSTIKTD | | |
| | | | VPLQDLLTSGLLKGQIVYLDLQSMIMVVS | | |
| | | | VSVPTIALHSMAKVYTLKAISAHVNNAEV | | |
| | | | QMQVPSRVMELGSEIMGYDIDQCEETSRY | | |
| | | | LFCPYNGGSILSATMKMCLNGNISQCVFTP | | |
| | | | IYGSFLQRFVLVDGVIVANCRDMTCACKSP | | |
| | | | SKIITQPDSLPVTIIDSTSCSNLVLDTLELPIIS | | |
| | | | INNATYRPVQYVGPNQIIFSQPLDLLSQLGK | | |
| | | | INSSLSDAIEHLAKSDEILEQIQWDSPQGYT | | |
| | | | LIALTSVLAFVVVAIVGLLISTRYLIFEIRRI | | |
| | | | NTTLTQQLSSYVLSNKIIQY | | |
| NC_017937 | 4534-6330 | gb: NC_017937: | MAEQEKTPLRYKILLIIIVINHYNITNVFGQI | 2 | 37 |
| | | 4534-6330\|Organism: | HLANLSSIGVFVTKTLDYRTTSDPTEQLLVI | | |
| | | Nariva virus\|Strain | NMLPNISNIQDCAQGVVNEYKHLISSLLTPI | | |
| | | Name: UNKNOWN- | NDTLDLITSNINPYSGRNKLFGEIIAGAALT | | |
| | | NC_017937\|Protein | VATSAQITAGVALYEARQNAKDIAAIKESL | | |
| | | Name: fusion | GYAYKAIDKLTTATREITVVINELQDQINN | | |
| | | protein\|Gene | RLIPRINDLACEVWATRLQAMLLQYYAEIF | | |
| | | Symbol: F | SVIGPNLQDPLSGKISIQALARAAGGNIKL | | |
| | | | MVDELNYSGQDLSRLVKVGAIKGQIIDAD | | |
| | | | PSLGVVIIKMRYPNIIKIPNVAISELSYVSYS | | |
| | | | SDGQDWITTGPNYIVTRGYSIANIQTSSCSV | | |
| | | | GDDFVLCDRDMTYPMSQVTQDCLRGNIAL | | |
| | | | CSRMVVRDREAPRYLILQGNMVANCMSIT | | |
| | | | CRCEEPESEIYQSPDQPLTLLTRDTCDTHV | | |
| | | | VDGIRIRLGVRKLPTISVINNITLGPIITTDPI | | |
| | | | DVSNQLNAVVSTIDQSAELLHQAQRVLSE | | |
| | | | RARGARDHILATAAIVICVVLAVLILVLLIG | | |
| | | | LVYLYRTQNEILVKTTMLEQVPTFAPKSFP | | |
| | | | MESQIYSGKTNKGYDPAE | | |
| NC_025256 | 6865-8853 | gb: NC_025256: | MKKKTDNPTISKRGHNHSRGIKSRALLRET | 2 | 38 |
| | | 6865-8853\|Organism: | DNYSNGLIVENLVRNCHHPSKNNLNYTKT | | |
| | | Bat Paramyxovirus | QKRDSTIPYRVEERKGHYPKIKHLIDKSYK | | |
| | | Eid_hel/GH-M74a/GHA/ | HIKRGKRRNGHNGNIITIILLLILILKTQMSE | | |
| | | 2009\|Strain | GAIHYETLSKIGLIKGITREYKVKGTPSSKD | | |
| | | Name: BatPV/Eid_hel/ | IVIKLIPNVTGLNKCTNISMENYKEQLDKIL | | |
| | | GH-M74a/GHA/2009\|Protein | IPINNIIELYANSTKSAPGNARFAGVIIAGVA | | |
| | | Name: fusion | LGVAAAAQITAGIALHEARQNAERINLLKD | | |
| | | protein\|Gene | SISATNNAVAELQEATGGIVNVITGMQDYI | | |
| | | Symbol: F | NTNLVPQIDKLQCSQIKTALDISLSQYYSEI | | |
| | | | LTVFGPNLQNPVTTSMSIQAISQSFGGNIDL | | |
| | | | LLNLLGYTANDLLDLLESKSITGQITYINLE | | |
| | | | HYFMVIRVYYPIMTTISNAYVQELIKISFNV | | |
| | | | DGSEWVSLVPSYILIRNSYLSNIDISECLITK | | |
| | | | NSVICRHDFAMPMSYTLKECLTGDTEKCP | | |
| | | | REAVVTSYVPRFAISGGVIYANCLSTTCQC | | |
| | | | YQTGKVIAQDGSQTLMMIDNQTCSIVRIEE | | |
| | | | ILISTGKYLGSQEYNTMHVSVGNPVFTDKL | | |
| | | | DITSQISNINQSIEQSKFYLDKSKAILDKINL | | |
| | | | NLIGSVPISILFIIAILSLILSIITFVIVMIIV | | |
| | | | RRYNKYTPLINSDPSSRRSTIQDVYIIPNPGE | | |
| | | | HSIRSAARSIDRDRD | | |
| NC_025347 | 4471-6386 | gb: NC_025347: | MRVRPLIIILVLLVLLWLNILPVIGLDNSKIA | 2 | 39 |
| | | 4471-6386\|Organism: | QAGIISAQEYAVNVYSQSNEAYIALRTVPY | | |
| | | Avian paramyxovirus | IPPHNLSCFQDLINTYNTTIQNIFSPIQDQITS | | |
| | | 7\|Strain | ITSASTLPSSRFAGLVVGAIALGVATSAQIT | | |
| | | Name: APMV-7/dove/ | AAVALTKAQQNAQEIIRLRDSIQNTINAVN | | |
| | | Tennessee/4/75\|Protein | DITVGLSSIGVALSKVQNYLNDVINPALQN | | |
| | | Name: fusion | LSCQVSALNLGIQLNLYLTEITTIFGPQITNP | | |
| | | protein\|Gene | SLTPLSIQALYTLAGDNLMQFLTRYGYGET | | |
| | | Symbol: F | SVSSILESGLISAQIVSFDKQTGIAILYVTLPS | | |
| | | | IATLSGSRVTKLMSVSVQTGVGEGSAIVPS | | |
| | | | YVIQQGTVIEEFIPDSCIFTRSDVYCTQLYS | | |
| | | | KLLPDSILQCLQGSMADCQFTRSLGSFANR | | |
| | | | FMTVAGGVIANCQTVLCRCYNPVMIIPQN | | |
| | | | NGIAVTLIDGSLCKELELEGIRLTMADPVF | | |
| | | | ASYSRDLIINGNQFAPSDALDISSELGQLNN | | |
| | | | SISSATDNLQKAQESLNKSIIPAATSSWLIIL | | |
| | | | LFVLVSISLVIGCISIYFIYKHSTTNRSRNLSS | | |
| | | | DIISNPYIQKAN | | |
| NC_025348 | 4790-6570 | gb: NC_025348: | MAPCVLFLSSLLLISTISPSHGINQPALRRIG | 2 | 40 |
| | | 4790-6570\|Organism: | AIVSSVKQLKFYSKTKPNYIIVKLLPTINLS | | |
| | | Tuhoko virus 2\|Strain | KSNCNLTSINRYKESVIEIIKPLADNIDNLN | | |
| | | Name: UNKNOWN- | QKLLPKNRRKRMAGVAIGLAALGVAAAA | | |
| | | NC_025348\|Protein | QATAAVALVEARKNTQMIQSLADSIQDTN | | |
| | | Name: fusion | AAVQAVNIGLQNSAVAIQAIQNQINNVINP | | |
| | | protein\|Gene | ALDRLNCEVLDAQIASILNLYLIKSVTIFQN | | |
| | | Symbol: F | QLTNPALQQLSIQMLSIVMQDTAKILGNFTI | | |
| | | | GDKFDQHDLLGSGLITGQVVGVNLTNLQL | | |
| | | | IIAAFIPSIAPLPQAYIIDLISITISVNDTEAVI | | |
| | | | QIPERIMEHGSSIYQFGGKQCVYGQFSAYC | | |
| | | | PFSDAVLMTQDLQLCMKGNIEHCIFSSVLG | | |
| | | | SFPNRFASVDGVFYANCKYMSCACSDPLQ | | |
| | | | VIHQDDSVNLMVIDSSVCRSLTLGHVTFPII | | |
| | | | AFSNVSYQMKTNISIEQMIVTSPLDLSTELK | | |
| | | | QINNSVNIANTFLDSSNRALKTSIFGTSSQII | | |
| | | | LIVLLIFTCLLILYVIFLTYIIKILIKEVKRLRD | | |
| | | | GNSRTGSKLSFINPDV | | |
| NC_025350 | 4663-6428 | gb: NC_025350: | MLWLTILIALVGNHESTCMNINFLQSLGQI | 2 | 41 |
| | | 4663-6428\|Organism: | NSQKRFLNFYTQQPPSYMVIRLVPTLQLSA | | |
| | | Tuhoko virus 3\|Strain | NNCTLGSIVRYRNAIKELIQPMDENLRWLS | | |
| | | Name: UNKNOWN- | SNLIPQRRGKRFAGVAVGLAALGVAVAAQ | | |
| | | NC_025350\|Protein | ATAAVALVEARANAEKIASMSQSIQETNK | | |
| | | Name: fusion | AVTSLSQAVSASGIAIQAIQNEINNVIHPILN | | |
| | | protein\|Gene | QVQCDVLDARVGNILNLYLIKVTTIFQNQL | | |
| | | Symbol: F | TNPALQRLSTQALSMLMQSTSSYLRNLSSS | | |
| | | | ESAINADLSMTNLIEAQIVGINMTNLQLVL | | |
| | | | AVFIPSIARLNGALLYDFISITISSNQTEVML | | |
| | | | QIPHRVLEIGNSLYTFEGTQCEMTKLNAYC | | |
| | | | LYSDAIPVTESLRDCMNGLFSQCGFVRIIGS | | |
| | | | FANRFASVNGVIYANCKHLTCSCLQPDEIIT | | |
| | | | QDTNVPLTIIDTKRCTKISLGHLTFTIREYA | | |
| | | | NVTYSLRTEIANSQITVVSPLDLSSQLTTIN | | |
| | | | NSLADATNHIMNSDRILDRLNSGLYSKWVI | | |
| | | | IFLICASIVSLIGLVFLGFLIRGLILELRSKHR | | |
| | | | SNLNKASTYSIDSSIGLT | | |
| NC_025352 | 5950-8712 | gb: NC_025352: | MALNKNMFSSLFLGYLLVYATTVQSSIHY | 2 | 42 |
| | | 5950-8712\|Organism: | DSLSKVGVIKGLTYNYKIKGSPSTKLMVV | | |
| | | Mojiang virus\|Strain | KLIPNIDSVKNCTQKQYDEYKNLVRKALEP | | |
| | | Name: Tongguan1\|Protein | VKMAIDTMLNNVKSGNNKYRFAGAIMAG | | |
| | | Name: fusion protein\|Gene | VALGVATAATVTAGIALHRSNENAQAIAN | | |
| | | Symbol: F | MKSAIQNTNEAVKQLQLANKQTLAVIDTI | | |
| | | | RGEINNNIIPVINQLSCDTIGLSVGIRLTQYY | | |
| | | | SEIITAFGPALQNPVNTRITIQAISSVFNGNF | | |
| | | | DELLKIMGYTSGDLYEILHSELIRGNIIDVD | | |
| | | | VDAGYIALEIEFPNLTLVPNAVVQELMPIS | | |
| | | | YNIDGDEWVTLVPRFVLTRTTLLSNIDTSR | | |
| | | | CTITDSSVICDNDYALPMSHELIGCLQGDTS | | |
| | | | KCAREKVVSSYVPKFALSDGLVYANCLNT | | |
| | | | ICRCMDTDTPISQSLGATVSLLDNKRCSVY | | |
| | | | QVGDVLISVGSYLGDGEYNADNVELGPPI | | |
| | | | VIDKIDIGNQLAGINQTLQEAEDYIEKSEEF | | |
| | | | LKGVNPSIITLGSMVVLYIFMILIAIVSVIAL | | |
| | | | VLSIKLTVKGNVVRQQFTYTQHVPSMENI | | |
| | | | NYVSH | | |
| NC_025363 | 4622-6262 | gb: NC_025363: | MAIPVPSSTALMIFNILVSLAPASALDGRLL | 2 | 43 |
| | | 4622-6262\|Organism: | LGAGIVPTGDRQVNVYTSSQTGIIALKLLP | | |
| | | Avian paramyxovirus | NLPKDKENCAEVSIRSYNETLTRILTPLAQS | | |
| | | 12\|Strain | MAAIRGNSTVSTRGREPRLVGAIIGGVALG | | |
| | | Name: Wigeon/Ita1y/ | VATAAQITAATALIQANQNAENIARLAKG | | |
| | | 3920_1/2005\|Protein | LAATNEAVTDLTKGVGSLAIGVGKLQDYV | | |
| | | Name: fusion | NEQFNRTGEAIECLTIESRVGVQLSLYLTEV | | |
| | | protein\|Gene | IGVFGDQITSPALSDISIQALYNLAGGNLNV | | |
| | | Symbol: F | LLQKMGIEGTQLGSLINSGLIKGRPIMYDD | | |
| | | | GNKILGIQVTLPSVGRINGARATLLEAIAVA | | |
| | | | TPKGNASPLIPRAVISVGSLVEELDMTPCVL | | |
| | | | TPTDIFCTRILSYPLSDSLTTCLKGNLSSCVF | | |
| | | | SRTEGALSTPYVSVHGKIVANCKSVVCRC | | |
| | | | VEPQQIISQNYGEALSLIDESLCRILELNGVI | | |
| | | | LKMDGQFTSEYTKNITIDPVQVIISGPIDISS | | |
| | | | ELSQVNQSLDSALENIKESNSYLSKVNVKL | | |
| | | | ISSSAMITYIVITVICLILTFVALVLGIYSYTK | | |
| | | | IRSQQKTLIWMGNNIARSKEGNRF | | |
| NC_025373 | 4617-6582 | gb: NC_025373: | MASPMVPLLIITVVPALISSQSANIDKLIQA | 2 | 44 |
| | | 4617-6582\|Organism: | GIIMGSGKELHIYQESGSLDLYLRLLPVIPS | | |
| | | Avian paramyxovirus | NLSHCQSEVITQYNSTVTRLLSPIAKNLNH | | |
| | | 3\|Strain | LLQPRPSGRLFGAVIGSIALGVATSAQISAA | | |
| | | Name: turkey/ | IALVRAQQNANDILALKAAIQSSNEAIKQL | | |
| | | Wisconsin/68\|Protein | TYGQEKQLLAISKIQKAVNEQVIPALTALD | | |
| | | Name: fusion | CAVLGNKLAAQLNLYLIEMTTIFGDQINNP | | |
| | | protein\|Gene | VLTPIPLSYLLRLTGSELNDVLLQQTRSSLS | | |
| | | Symbol: F | LIHLVSKGLLSGQIIGYDPSVQGIIIRIGLIRT | | |
| | | | QRIDRSLVFXPYVLPITISSNIATPIIPDCVVK | | |
| | | | KGVIIEGMLKSNCIELERDIICKTINTYQITK | | |
| | | | ETRACLQGNITMCKYQQSRTQLSTPFITYN | | |
| | | | GVVIANCDLVSCRCIRPPMIITQVKGYPLTII | | |
| | | | NRNLCTELSVDNLILNIETNHNFSLNPTIIDS | | |
| | | | QSRLIATSPLEIDALIQDAQHHAAAALLKV | | |
| | | | EESNAHLLRVTGLGSSSWHIILILTLLVCTI | | |
| | | | AWLIGLSIYVCRIKNDDSTDKEPTTQSSNR | | |
| | | | GIGVGSIQYMT | | |
| NC_0253 | 5548-7206 | gb: NC_025386: | MNPLNQTLIAKVLGFLLLSSSFTVGQIGFEN | 2 | 45 |
| 86 | | 5548-7206\|Organism: | LTRIGVHQVKQYGYKLAHYNSHQLLLIRM | | |
| | | Salem virus\|Strain | IPTVNGTHNCTHQVITRYREMVREIITPIKG | | |
| | | Name: UNKNOWN- | ALDIMKKAVSPDLVGARIFGAIVAGAALGI | | |
| | | NC_025386\|Protein | ATSAQITAGVALHRTKLNGQEISKLKEAVS | | |
| | | Name: fusion | LTNEAVEQLQYSQGKSILAIQGIQDFINFNV | | |
| | | protein\|Gene | VPLLEEHTCGIAKLHLEMALMEYFQKLILV | | |
| | | Symbol: F | FGPNLRDPIGSTIGIQALATLFQNNMFEVSL | | |
| | | | RLGYAGDDLEDVLQSNSIRANIIEAEPDSGF | | |
| | | | IVLAIRYPTLTLVEDQVITELAHITFNDGPQ | | |
| | | | EWVATIPQFVTYRGLVLANIDVSTCTFTER | | |
| | | | NVICARDQTYPMIIDLQLCMRGNIAKCGRT | | |
| | | | RVTGSTASRFLLKDGNMYANCIATMCRC | | |
| | | | MSSSSIINQEPSHLTTLIVKETCSEVMIDTIRI | | |
| | | | TLGERKHPPIDYQTTITLGQPIALAPLDVGT | | |
| | | | ELANAVSYLNKSKVLLEHSNEVLSSVSTA | | |
| | | | HTSLTATIVLGIVVGGLAILIVVMFLFLEAQ | | |
| | | | VIKVQRAMMLCPITNHGYLPNEDLLTRGH | | |
| | | | SIPTIG | | |
| NC_025390 | 4805-6460 | gb: NC_025390: | MGYFHLLLILTAIAISAHLCYTTTLDGRKLL | 2 | 46 |
| | | 6460\|Organism: | GAGIVITEEKQVRVYTAAQSGTIVLRSFRV | | |
| | | Avian paramyxovirus | VSLDRYSCMESTIESYNKTVYNILAPLGDA | | |
| | | 9\|Strain | IRRIQASGVSVERIREGRIFGAILGGVALGV | | |
| | | Name: duck/New | ATAAQITAAIALIQANENAKNILRIKDSITK | | |
| | | York/22/1978\|Protein | TNEAVRDVTNGVSQLTIAVGKLQDFVNKE | | |
| | | Name: fusion | FNKTTEAINCVQAAQQLGVELSLYLTEITT | | |
| | | protein\|Gene | VFGPQITSPALSKLTIQALYNLAGVSLDVLL | | |
| | | Symbol: F | GRLGADNSQLSSLVSSGLITGQPILYDSESQ | | |
| | | | ILALQVSLPSISDLRGVRATYLDTLAVNTA | | |
| | | | AGLASAMIPKVVIQSNNIVEELDTTACIAA | | |
| | | | EADLYCTRITTFPIASAVSACILGDVSQCLY | | |
| | | | SKTNGVLTTPYVAVKGKIVANCKHVTCRC | | |
| | | | VDPTSIISQNYGEAATLIDDQLCKVINLDGV | | |
| | | | SIQLSGTFESTYVRNVSISANKVIVSSSIDIS | | |
| | | | NELENVNSSLSSALEKLDESDAALSKVNV | | |
| | | | HLTSTSAMATYIVLTVIALILGFVGLGLGCF | | |
| | | | AMIKVKSQAKTLLWLGAHADRSYILQSKP | | |
| | | | AQSST | | |
| NC_025403 | 4826-6649 | gb: NC_025403: | MWIMIILSLFQIIPGVTPINSKVLTQLGVITK | 2 | 47 |
| | | 4826-6649\|Organism: | HTRQLKFYSHSTPSYLVVKLVPTINTESTV | | |
| | | Achimota virus 1\|Strain | CNFTSLSRYKDSVRELITPLAKNIDNLNSIL | | |
| | | Name: UNKNOWN- | TIPKRRKRMAGVVIGLAALGVAAAAQATA | | |
| | | NC_025403\|Protein | AVALIEAKKNTEQIQALSESIQNTNKAVSSI | | |
| | | Name: fusion | EKGLSSAAIAVQAIQNQINNVINPALTALD | | |
| | | protein\|Gene | CGVTDAQLGNILNLYLIKTLTVFQKQITNP | | |
| | | Symbol: F | ALQPLSIQALNIIMQETSSVLRNFTKTDEIE | | |
| | | | HTDLLTSGLITGQVVGVNLTNLQLIIAAFIP | | |
| | | | SIAPLNQAYILDFIRITVNINNSESMIQIPERI | | |
| | | | MEHGISLYQFGGDQCTFSDWSAYCPYSDA | | |
| | | | TLMAPGLQNCFRGQAADCVFSTVMGSFPN | | |
| | | | RFVSVQGVFYVNCKFIRCACTQPQRLITQD | | |
| | | | DSLSLTQIDAKTCRMLTLGFVQFSINEYAN | | |
| | | | VTYSFKNNVTAGQLIMTNPIDLSTEIKQMN | | |
| | | | DSVDEAARYIEKSNAALNKLMYGGRSDIV | | |
| | | | TTVLLVGFILLVVYVIFVTYILKILMKEVAR | | |
| | | | LRNSNHPDLIKPYNYPM | | |
| NC_025404 | 4772-6647 | gb: NC_025404: | MLNSFYQIICLAVCLTTYTVISIDQHNLLKA | 2 | 48 |
| | | 4772-6647\|Organism: | GVIVKSIKGLNFYSRGQANYIIVKLIPNVNV | | |
| | | Achimota virus 2\|Strain | TDTDCDIGSIKRYNETVYSLIKPLADNIDYL | | |
| | | Name: UNKNOWN- | RTQFAPTKRKKRFAGVAIGLTALGVATAA | | |
| | | NC_025404\|Protein | QVTAAVALVKAQENARKLDALADSIQAT | | |
| | | Name: fusion | NEAVQDLSTGLQAGAIAIQAIQSEINHVINP | | |
| | | protein\|Gene Symbol: F | ALERLSCEIIDTRVASILNLYLIRLTTVFHRQ | | |
| | | | LVNPALTPLSIQALNHLLQGETEGLVKNES | | |
| | | | KMTDSKIDLLMSGLITGQVVGVNIKHMQL | | |
| | | | MIAVFVPTTAQLPNAYVINLLTITANINNSE | | |
| | | | VLVQLPNQILERSGIIYQFRGKDCVSSPNH | | |
| | | | MYCPYSDASILSPELQLCLQGRLEMCLFTQ | | |
| | | | VVGSFPTRFASDKGIVYANCRHLQCACSEP | | |
| | | | EGIIYQDDTSAITQIDASKCSTLKLDMLTFK | | |
| | | | LSTYANKTFDASFSVGKDQMLVTNLLDLS | | |
| | | | AELKTMNASVAHANKLIDKSNLLIQSNALI | | |
| | | | GHSNTIFIVVIVILAVMVLYLIIVTYIIKVIM | | |
| | | | VEVSRLKRMNIYSIDK | | |
| NC_025410 | 4958-6751 | gb: NC_025410: | MVTIIKPLILLVTVILQISGHIDTTALTSIGA | 2 | 49 |
| | | 4958-6751\|Organism: | VIASSKEIMYYAQSTPNYIVIKLIPNLPNIPS | | |
| | | Tuhoko virus 1\|Strain | QCNFSSIAYYNKTLLDLFTPISDNINMLHQR | | |
| | | Name: UNKNOWN- | LSNTGRNRRFAGVAIGLAALGVATAAQVT | | |
| | | NC_025410\|Protein | AAFALVEAKSNTAKIAQIGQAIQNTNAAIN | | |
| | | Name: fusion protein\|Gene | SLNAGIGGAVTAIQAIQTQINGIITDQINAA | | |
| | | Symbol: F | TCTALDAQIGTLLNMYLLQLTTTFQPQIQN | | |
| | | | PALQPLSIQALHRIMQGTSIVLSNLTDSSKY | | |
| | | | GLNDALSAGLITGQIVSVDLRLMQITIAAN | | |
| | | | VPTLSRLENAIAHDIMRITTNVNNTEVIVQL | | |
| | | | PETIMEHAGRLYQFNKDHCLSSTQRFFCPY | | |
| | | | SDAKLLTSKISSCLSGIRGDCIFSPVVGNFA | | |
| | | | TRFISVKGVIIANCKFIRCTCLQPEGIISQLD | | |
| | | | DHTLTVIDLKLCNKLDLGLIQFDLQVLSNIS | | |
| | | | YEMTLNTSQNQLILTDPLDLSSELQTMNQS | | |
| | | | INNAANFIEKSNSLLNSSTYEFNRSVALLVA | | |
| | | | LILLSLTILYVIVLTCVVKLLVHEVSKNRRH | | |
| | | | IQDLESHHK | | |
| NC_028249 | 4850-7055 | gb: NC_028249: | MTRVKKLPVPTNPPMHHSLDSPFLNPEHA | 2 | 50 |
| | | 4850-7055\|Organism: | TGKISITDDTSSQLTNFLYHKYHKTTINHLS | | |
| | | Phocine distemper | RTISGTDPPSAKLNKFGSPILSTYQIRSALW | | |
| | | virus\|Strain | WIAMVILVHCVMGQIHWTNLSTIGIIGTDS | | |
| | | Name: PDV/Wadden_Sea.NLD/ | SHYKIMTRSSHQYLVLKLMPNVSIIDNCTK | | |
| | | 1988\|Protein | AELDEYEKLLNSVLEPINQALTLMTKNVKS | | |
| | | Name: fusion | LQSLGSGRRQRRFAGVVIAGAALGVATAA | | |
| | | protein\|Gene | QITAGVALYQSNLNAQAIQSLRASLEQSNK | | |
| | | Symbol: F | AIDEVRQASQNIIIAVQGVQDYVNNEIVPA | | |
| | | | LQHMSCELIGQRLGLKLLRYYTELLSVFGP | | |
| | | | SLRDPVSAEISIQALSYALGGEIHKILEKLG | | |
| | | | YSGNDMVAILETKGIRAKITHVDLSGKFIV | | |
| | | | LSISYPTLSEVKGVVVHRLEAVSYNIGSQE | | |
| | | | WYTTVPRYVATNGYLISNFDESSCVFVSES | | |
| | | | AICSQNSLYPMSPILQQCLRGETASCARTL | | |
| | | | VSGTLGNKFILSKGNIIANCASILCKCHSTS | | |
| | | | KIINQSPDKLLTFIASDTCSLVEIDGVTIQVG | | |
| | | | SRQYPDVVYASKVILGPAISLERLDVGTNL | | |
| | | | GSALKKLNDAKVLIESSDQILDTVKNSYLS | | |
| | | | LGTLIALPVSIGLGLILLLLICCCKKRYQHLF | | |
| | | | SQSTKVAPVFKPDLTGTSKSYVRSL | | |
| NC_028362 | 5217-6842 | gb: NC_028362: | MIKKIICIFSMPILLSFCQVDIIKLQRVGILVS | 2 | 51 |
| | | 5217-6842\|Organism: | KPKSIKISQNFETRYLVLNLIPNIENAQSCG | | |
| | | Caprine parainfluenza | DQQIKQYKKLLDRLIIPLYDGLRLQQDIIVV | | |
| | | virus 3\|Strain | DNNLKNNTNHRAKRFFGEIIGTIALGVATS | | |
| | | Name: JS2013\|Protein | AQITAAVALVEAKQARSDIERVKNAVRDT | | |
| | | Name: fusion | NKAVQSIQGSVGNLIVAVKSVQDYVNNEI | | |
| | | protein\|Gene | VPSIKRLGCEAAGLQLGIALTQHYSELTNIF | | |
| | | Symbol: F | GDNIGTLKEKGIKLQGIASLYHTNITEIFTTS | | |
| | | | TVDQYDIYDLLFTESIKMRVIDVDLNDYSI | | |
| | | | TLQVRLPLLTKISDAQIYNVDSVSYNIGGTE | | |
| | | | WYIPLPRNIMTKGAFLGGANLQDCIESFSD | | |
| | | | YICPSDPGFILNRDIENCLSGNITQCPKTLVI | | |
| | | | SDIVPRYAFVDGGVIANCLSTTCTCNGIDN | | |
| | | | RINQAPDQGIKIITYKDCQTIGINGMLFKTN | | |
| | | | QEGTLAAYTPVDITLNNSVNLDPIDLSIELN | | |
| | | | RARSDLAESKEWIKRSEAKLDSVGSWYQS | | |
| | | | STTEIIQIVMIIVLFIINIIVLIVLIKYSRSQ | | |
| | | | NQSMNNHMNEPYILTNKVQ | | |
| AF079780 | 5919-7580 | gb: AF079780\|Organism: | MASLLKTICYIYLITYAKLEPTPKSQLDLDS | 1 | 52 |
| | | Tupaiaparamyxovirus\|Strain | LASIGVVDAGKYNYKLMTTGSEKLMVIKL | | |
| | | Name: UNKNOWN- | VPNITYATNCNLTAHTAYTKMIERLLTPIN | | |
| | | AF079780\|Protein | QSLYEMRSVITERDGGTIFWGAIIAGAALG | | |
| | | Name: fusion | VATAAAITAGVALHRAEQNARNIAALKDA | | |
| | | protein\|Gene Symbol: F | LRNSNEAIQHLKDAQGHTVLAIQGLQEQIN | | |
| | | | NNIIPKLKESHCLGVNNQLGLLLNQYYSEI | | |
| | | | LTVFGPNLQNPVSASLTIQAIAKAFNGDFN | | |
| | | | SLMTNLNYDPTDLLDILESNSINGRIIDVNL | | |
| | | | NEKYIALSIEIPNFITLTDAKIQTFNRITYGY | | |
| | | | GSNEWLTLIPDNILEYGNLISNVDLTSCVKT | | |
| | | | KSSYICNQDTSYPISSELTRCLRGDTSSCPR | | |
| | | | TPVVNSRAPTFALSGGHIYANCAKAACRC | | |
| | | | EKPPMAIVQPATSTLTFLTEKECQEVVIDQI | | |
| | | | NIQLAPNRLNKTIITDGIDLGPEVIINPIDVS | | |
| | | | AELGNIELEMDKTQKALDRSNKILDSMITE | | |
| | | | VTPDKLLIAMIVVFGILLLWLFGVSYYAFKI | | |
| | | | WSKLHFLDSYVYSLRNPSHHRSNGHQNHS | | |
| | | | FSTDISG | | |
| EU403085 | 4664-6585 | gb: EU403085: | MQPGSALHLPHLYIIIALVSDGTLGQTAKID | 1 | 53 |
| | | 4664-6585\|Organism: | RLIQAGIVLGSGKELHISQDSGTLDLFVRLL | | |
| | | Avian paramyxovirus | PVLPSNLSHCQLEAITQYNKTVTRLLAPIG | | |
| | | 3\|Strain | KNLEQVLQARPRGRLFGPIIGSIALGVATSA | | |
| | | Name: | QITAAIALVRAQQNANDILALKNALQSSNE | | |
| | | APMV3/PKT/Netherland/ | AIRQLTYGQDKQLLAISKIQKAVNEQILPA | | |
| | | 449/75\|Protein | LDQLDCAVLGTKLAVQLNLYLIEMTTIFGE | | |
| | | Name: fusion | QINNPVLATIPLSYILRLTGAELNNVLMKQ | | |
| | | protein\|Gene | ARSSLSLVQLVSKGLLSGQVIGYDPSVQGL | | |
| | | Symbol: F | IIRVNLMRTQKIDRALVYQPYVLPITLNSNI | | |
| | | | VTPIAPECVIQKGTIIEGMSRKDCTELEQDII | | |
| | | | CRTVTTYTLARDTRLCLQGNISSCRYQQSG | | |
| | | | TQLHTPFITYNGAVIANCDLVSCRCLRPPMI | | |
| | | | ITQVKGYPLTIITRSVCQELSVDNLVLNIET | | |
| | | | HHNFSLNPTIIDPLTRVIATTPLEIDSLIQEA | | |
| | | | QDHANAALAKVEESDKYLRAVTGGNYSN | | |
| | | | WYIVLVIVLLFGNLGWSLLLTVLLCRSRKQ | | |
| | | | QRRYQQDDSVGSERGVGVGTIQYMS | | |
| KX258200 | 4443-6068 | gb: KX258200: | MEKGTVLFLAALTLYNVKALDNTKLLGA | 1 | 54 |
| | | 4443-6068\|Organism: | GIASGKEHELKIYQSSVNGYIAVKLIPFLPS | | |
| | | Avian paramyxovirus | TKRECYNEQLKNYNATINRLMGPINDNIKL | | |
| | | 14\|Strain | VLSGVKTRTREGKLIGAIIGTAALGLATAA | | |
| | | Name: APMV14/duck/ | QVTAAIALEQAQDNARAILTLKESIRNTNN | | |
| | | Japan/11OG0352/ | AVSELKTGLSEVSIALSKTQDYINTQIMPAL | | |
| | | 2011\|Protein | SNLSCEIVGLKIGIQLSQYLTEVTAVFGNQI | | |
| | | Name: fusion protein\|Gene | TNPALQPLSMQALYQLCGGDFSLLLDKIG | | |
| | | Symbol: F | ADRNELESLYEANLVTGRIVQYDTADQLVI | | |
| | | | IQVSIPSVSTLSGYRVTELQSISVDMDHGEG | | |
| | | | KAVIPRYIVTSGRVIEEMDISPCVLTATAVY | | |
| | | | CNRLLTTSLPESVLKCLDGDHSSCTYTSNS | | |
| | | | GVLETRYIAFDGMLIANCRSIVCKCLDPPYI | | |
| | | | IPQNKGKPLTIISKEVCKKVTLDGITLLIDAE | | |
| | | | FTGEYGLNITIGPDQFAPSGALDISTELGKL | | |
| | | | NNSINKAEDYIDKSNELLNRVNVDIVNDTA | | |
| | | | VIVLCVMSALVVVWCIGLTVGLIYVSKNT | | |
| | | | LRAVAIKGTSIENPYVSSGKHAKNSS | | |
| KY511044 | 4592-6247 | gb: KY511044: | MIFTMYHVTVLLLLSLLTLPLGIQLARASID | 1 | 55 |
| | | 4592-6247\|Organism: | GRQLAAAGIVVTGEKAINLYTSSQTGTIVV | | |
| | | Avian paramyxovirus | KLLPNVPQGREACMRDPLTSYNKTLTSLLS | | |
| | | UPO216\|Strain | PLGEAIRRIHESTTETAGLVQARLVGAIIGS | | |
| | | Name: APMV-15/WB/Kr/ | VALGVATSAQITAAAALIQANKNAENILKL | | |
| | | UPO216/2014\|Protein | KQSIAATNEAVHEVTDGLSQLAVAVGKM | | |
| | | Name: fusion | QDFINTQFNNTAQEIDCIRISQQLGVELNLY | | |
| | | protein\|Gene | LTELTTVFGPQITSPALSPLSIQALYNLAGG | | |
| | | Symbol: F | NLDVLLSKIGVGNNQLSALISSGLISGSPILY | | |
| | | | DSQTQLLGIQVTLPSVSSLNNMRAIFLETLS | | |
| | | | VSTDKGFAAALIPKVVTTVGTVTEELDTSY | | |
| | | | CIETDIDLFCTRIVTFPMSPGIYACLNGNTSE | | |
| | | | CMYSKTQGALTTPYMSVKGSIVANCKMTT | | |
| | | | CRCADPASIISQNYGEAVSLIDSSVCRVITL | | |
| | | | DGVTLRLSGSFDSTYQKNITIRDSQVIITGS | | |
| | | | LDISTELGNVNNSINNALDKIEESNQILESV | | |
| | | | NVSLTSTNALIVYIICTALALICGITGLILSC | | |
| | | | YIMYKMRSQQKTLMWLGNNTLDQMRAQ | | |
| | | | TKM | | |
| NC_025360 | 6104-8123 | gb: NC_025360: | MDGPKFRFVLLILLTAPARGQVDYDKLLK | 1 | 56 |
| | | 6104-8123\|Organism: | VGIFEKGTANLKISVSSQQRYMVIKMMPN | | |
| | | Atlantic salmon | LGPMNQCGIKEVNLYKESILRLITPISTTLN | | |
| | | paramyxovirus\|Strain | YIKSEIQVEREVALQPNGTIVRFFGLIVAAG | | |
| | | Name: ASPV/Yrkje371/ | ALTLATSAQITAGIALHNSLENAKAIKGLT | | |
| | | 95\|Protein | DAIKESNLAIQKIQDATAGTVIALNALQDQ | | |
| | | Name: fusion | VNTNIIPAINTLGCTAAGNTLGIALTRYYSE | | |
| | | protein\|Gene | LIMIFGPSLGNPVEAPLTIQALAGAFNGDLH | | |
| | | Symbol: F | GMIREYGYTPSDIEDILRTNSVTGRVIDVDL | | |
| | | | VGMNIVLEINLPTLYTLRDTKIVNLGKITY | | |
| | | | NVDGSEWQTLVPEWLAIRNTLMGGVDLS | | |
| | | | RCVVSSRDLICKQDPVFSLDTSIISCLNGNT | | |
| | | | ESCPRNRVVNSVAPRYAVIRGNILANCISTT | | |
| | | | CLCGDPGVPIIQKGDNTLTAMSINDCKLVG | | |
| | | | VDGYVFRPGPKAVNVTFNLPHLNLGPEVN | | |
| | | | VNPVDISGALGKVEQDLASSRDHLAKSEKI | | |
| | | | LSGINPNIINTEMVLVAVILSLVCAMVVIGI | | |
| | | | VCWLSILTKWVRSCRADCRRPNKGPDLGP | | |
| | | | IMSSQDNLSF | | |
| UniProt | | FUS_NIPAV | MVVILDKRCYCNLLILILMISECSVGILHYE | | 57 |
| ID: | | Fusion glycoprotein | KLSKIGLVKGVTRKYKIKSNPLTKDIVIKMI | | |
| Q9IH63 | | F0 OS = Nipah virus | PNVSNMSQCTGSVMENYKTRLNGILTPIKG | | |
| | | | ALEIYKNNTHDLVGDVRLAGVIMAGVAIG | | |
| | | | IATAAQITAGVALYEAMKNADNINKLKSSI | | |
| | | | ESTNEAVVKLQETAEKTVYVLTALQDYIN | | |
| | | | TNLVPTIDKISCKQTELSLDLALSKYLSDLL | | |
| | | | FVFGPNLQDPVSNSMTIQAISQAFGGNYET | | |
| | | | LLRTLGYATEDFDDLLESDSITGQIIYVDLS | | |
| | | | SYYIIVRVYFPILTEIQQAYIQELLPVSFNND | | |
| | | | NSEWISIVPNFILVRNTLISNIEIGFCLITKRS | | |
| | | | VICNQDYATPMTNNMRECLTGSTEKCPRE | | |
| | | | LVVSSHVPRFALSNGVLFANCISVTCQCQT | | |
| | | | TGRAISQSGEQTLLMIDNTTCPTAVLGNVII | | |
| | | | SLGKYLGSVNYNSEGIAIGPPVFTDKVDISS | | |
| | | | QISSMNQSLQQSKDYIKEAQRLLDTVNPSL | | |
| | | | ISMLSMIILYVLSIASLCIGLITFISFIIVEKKR | | |
| | | | NTYSRLEDRRVRPTSSGDLYYIGT | | |

[0485] In some embodiments, a fusogen described herein comprises an amino acid sequence of Table 2, or an amino acid sequence having at least 80%, 85%, 90%, 95%, 96%, 97%, 98%, or 99% sequence identity thereto, or an amino acid sequence having at least 80%, 85%, 90%, 95%, 96%, 97%, 98%, or 99% sequence identity to a portion of the sequence, e.g., a portion of 100, 200, 300, 400, 500, or 600 amino acids in length. For instance, in some embodiments, a fusogen described herein comprises an amino acid sequence having at least 80% identity to any amino acid sequence of Table 2. In some embodiments, a nucleic acid sequence described herein encodes an amino acid sequence of Table 2, or an amino acid sequence having at least 80%, 85%, 90%, 95%, 96%, 97%, 98%, or 99% sequence identity thereto, or an amino acid sequence having at least 80%, 85%, 90%, 95%, 96%, 97%, 98%, or 99% sequence identity to a portion of the sequence, e.g., a portion of 40, 50, 60, 80, 100, 200, 300, 400, 500, or 600 amino acids in length.

[0486] In some embodiments, a fusogen described herein comprises an amino acid sequence set forth in any one of SEQ ID NOS: 58-133, or an amino acid sequence having at least 80%, 85%, 90%, 95%, 96%, 97%, 98%, or 99% sequence identity thereto, or an amino acid sequence having at least 80%, 85%, 90%, 95%, 96%, 97%, 98%, or 99% sequence identity to a portion of the sequence, e.g., a portion of 100, 200, 300, 400, 500, or 600 amino acids in length. For instance, in some embodiments, a fusogen described herein comprises an amino acid sequence having at least 80% identity to an amino acid sequence set forth in any one of SEQ ID NOS: 58-133. In some embodiments, a nucleic acid sequence described herein encodes an amino acid sequence set forth in any one of SEQ ID NOS: 58-133, or an amino acid sequence having at least 80%, 85%, 90%, 95%, 96%, 97%, 98%, or 99% sequence identity thereto, or an amino acid sequence having at least 80%, 85%, 90%, 95%, 96%, 97%, 98%, or 99% sequence identity to a portion of the sequence, e.g., a portion of 40, 50, 60, 80, 100, 200, 300, 400, 500, or 600 amino acids in length.

TABLE 2
Paramyxovirus protein G, H, and HN sequence clusters. Column 1, Genbank ID includes the Genbank
ID of the whole genome sequence of the virus that is the centroid sequence of the cluster.
Column 2, nucleotides of CDS provides the nucleotides corresponding to the CDS of the gene in
the whole genome. Column 3, Full Gene Name, provides the full name of the gene including
Genbank ID, virus species, strain, and protein name. Column 4, Sequence, provides the amino acid
sequence of the gene. Column 5, #Sequences/Cluster, provides the number of sequences that
cluster with this centroid sequence.

| | Nucleo- | | | #Se- | SEQ |
|---|---|---|---|---|---|
| Genbank | tides | | | quences/ | ID |
| ID | of CDS | Full sequence ID | Sequence | Cluster | NO |
| KU950686 | 4643- | gb: KU950686: | MSKTKDQRTAKTLERTWDTLNHLLFISSC | 706 | 58 |
| | 5638 | 4643-5638\|Organism: | LYKLNLKSIAQITLSILAMIISTSLIIAAIIF | | |
| | | Human respiratory | IASANHKVTLTTAIIQDATNQIKNTTPTYLTQ | | |
| | | syncytial virus\|Strain | NPQLGISFSNLSGTTLQSTTILASTTPSAEST | | |
| | | Name: RSVA/ | PQSTTVKIINTTTTQILPSKPTTKQRQNKPQ | | |
| | | Homo sapiens/USA/ | NKPNNDFHFEVFNFVPCSICSNNPTCWAIC | | |
| | | TH_10506/2014\|Protein | KRIPNKKPGKKTTTKPTKKPTLKTTKKDP | | |
| | | Name: attachment | KPQTTKPKEALTTKPTGKPTINTTKTNIRT | | |
| | | glycoprotein\|Gene | TLLTSNTKGNPEHTSQEETLHSTTSEGYLS | | |
| | | Symbol: G | PSQVYTTSGQEETLHSTTSEGYLSPSQVYT | | |
| | | | TSEYLSQSLSSSNTTK | | |
| AB524405 | 6424- | gb: AB524405: | MERGVSQVALENDEREAKNTWRLVFRVT | 418 | 59 |
| | 8274 | 6424-8274\|Organism: | VLFLTIVTLAISAAALAFSMNASTPQDLEGI | | |
| | | Newcastle disease | PVAISKVEDKITSALGASQDVMDRIYKQV | | |
| | | virus\|Strain | ALESPLALLNTESTIMNALTSLSYQINGAA | | |
| | | Name: Goose/ | NASGCGAPVPDPDYIGGIGKELIVDDTSDV | | |
| | | Alaska/415/91\|Protein | TSFYPSAFQEHLNFIPAPTTGSGCTRIPSFD | | |
| | | Name: hemagglutinin- | MSATHYCYTHNVILSGCRDHSHSHQYLAL | | |
| | | neuraminidase | GVLRTSATGRVFFSTLRSINLDDTQNRKSC | | |
| | | protein\|Gene | SVSATPLGCDMLCSKVTETEEEDYQSTDP | | |
| | | Symbol: HN | TLMVHGRLGFDGQYHERDLDVHTLFGDW | | |
| | | | VANYPGVGGGSFINNRVWFPVYGGLKPG | | |
| | | | SPTDKRQEGQYAIYKRYNDTCPDDQEYQ | | |
| | | | VRMAKSAYKPNRFGGKRVQQAILSIGVST | | |
| | | | TLADDPVLTVTSNTITLMGAEGRVMTVGT | | |
| | | | SHYLYQRGSSYYSPAILYPLTIANKTATLQ | | |
| | | | DPYKFNAFTRPGSVPCQASARCPNSCVTG | | |
| | | | VYTDPYPIVFHKNHTLRGVFGTMLDDEQA | | |
| | | | RLNPVSAVFDSIARSRVTRVSSSSTKAAYT | | |
| | | | TSTCFKVVKTGKVYCLSIAEISNTLFGEFRI | | |
| | | | VPLLVEILRDEGRSEARSALTTQGHPGWN | | |
| | | | DEVVDPIFCAVTNQTDHRQKLEEYAQSWP | | |
| JQ582844 | 4686- | gb: JQ582844: | MSKNKNQRTARTLEKTWDTLNHLIVISSC | 278 | 60 |
| | 5636 | 4686-5636\|Organism: | LYKLNLKSIAQIALSVLAMIISTSLIIAAIIF | | |
| | | Human respiratory | IISANHKVTLTTVTVQTIKNHTEKNITTYLTQ | | |
| | | syncytial virus\|Strain | VSPERVSPSKQPTTTPPIHTNSATISPNTKSE | | |
| | | Name: NH1067\|Protein | THHTTAQTKGRTTTPTQNNKPSTKPRPKN | | |
| | | Name: receptor-binding | PPKKPKDDYHFEVFNFVPCSICGNNQLCKS | | |
| | | glycoprotein\|Gene | ICKTIPNNKPKKKPTTKPTNKPPTKTTNKR | | |
| | | Symbol: G | DPKTPAKTLKKETTINPTTKKPTPKTTERD | | |
| | | | TSTPQSTVLDTTTSKHTERDTSTPQSTVLD | | |
| | | | TTTSKHTIQQQSLHSITPENTPNSTQTPTAS | | |
| | | | EPSTSNSTQKL | | |
| AB254456 | 7271- | gb: AB254456: | MSPHRDRINAFYRDNPHPKGSRIVINREHL | 128 | 61 |
| | 9136 | 7271-9136\|Organism: | MIDRPYVLLAVLFVMFLSLIGLLAIAGIRL | | |
| | | Measles virus\|Strain | HRAAIYTAEIHKSLSTNLDVTNSIEHQVKD | | |
| | | Name: SSPE- | VLTPLFKIIGDEVGLRTPQRFTDLVKFISDK | | |
| | | Kobe-1\|Protein | IKFLNPDREYDFRDLTWCINPPERIKLDYD | | |
| | | Name: Hemagglutinin\|Gene | QYCADVAAEELMNALVNSTLLEARATNQ | | |
| | | Symbol: H | FLAVSKGNCSGPTTIRGQFSNMSLSLLDLY | | |
| | | | LSRGYNVSSIVTMTSQGMYGGTYLVGKP | | |
| | | | NLSSKGSELSQLSMHRVFEVGVIRNPGLG | | |
| | | | APVFHMTNYFEQPVSNDFSNCMVALGEL | | |
| | | | RFAALCHREDSVTVPYQGSGKGVSFQLVK | | |
| | | | LGVWKSPTDMQSWVPLSTDDPVIDRLYLS | | |
| | | | SHRGVIADNQAKWAVPTTRTDDKLRMET | | |
| | | | CFQQACKGKNQALCENPEWAPLKDNRIPS | | |
| | | | YGVLSVNLSLTVELKIKIASGFGPLITHGSG | | |
| | | | MDLYKTNHDNVYWLTIPPMKNLALGVIN | | |
| | | | TLEWIPRFKVSPNLFTVPIKEAGEDCHAPT | | |
| | | | YLPAEVDGDVKLSSNLVILPGQDLQYVLA | | |
| | | | TYDTSRVEHAVVYYVYSPSRSFSYFYPFRL | | |
| | | | PIKGVPIELQVECFTWDQKLWCRHFCVLA | | |
| | | | DSESGGHITHSGMVGMGVSCTVTREDGT | | |
| | | | NRRQGCQ | | |
| AB040874 | 6614- | gb: AB040874: | MEPSKLFTMSDNATFAPGPVINAADKKTF | 87 | 62 |
| | 8362 | 6614-8362\|Organism: | RTCFRILVLSVQAVTLILVIVTLGELVRMIN | | |
| | | Mumps virus\|Strain | DQGLSNQLSSIADKIRESATMIASAVGVM | | |
| | | Name: Miyahara\|Protein | NQVIHGVTVSLPLQIEGNQNQLLSTLATIC | | |
| | | Name: hemagglutinin- | TGKKQVSNCSTNIPLVNDLRFINGINKFIIE | | |
| | | neuraminidase\|Gene | DYATHDFSIGHPLNMPSFIPTATSPNGCTRI | | |
| | | Symbol: HN | PSFSLGKTHWCYTHNVINANCKDHTSSNQ | | |
| | | | YISMGILVQTASGYPMFKTLKIQYLSDGLN | | |
| | | | RKSCSIATVPDGCAMYCYVSTQLETDDYA | | |
| | | | GSSPPTQKLTLLFYNDTVTERTISPTGLEG | | |
| | | | NWATLVPGVGSGIYFENKLIFPAYGGVLP | | |
| | | | NSSLGVKSAREFFRPVNPYNPCSGPQQDL | | |
| | | | DQRALRSYFPSYFSNRRVQSAFLVCAWNQ | | |
| | | | ILVTNCELVVPSNNQTLMGAEGRVLLINN | | |
| | | | RLLYYQRSTSWWPYELLYEISFTFTNSGQS | | |
| | | | SVNMSWIPIYSFTRPGSGNCSGENVCPTAC | | |
| | | | VSGVYLDPWPLTPYSHQSGINRNFYFTGA | | |
| | | | LLNSSTTRVNPTLYVSALNNLKVLAPYGN | | |
| | | | QGLFASYTTTTCFQDTGDASVYCVYIMEL | | |
| | | | ASNIVGEFQILPVLTRLTIT | | |
| AB736166 | 6709- | gb: AB736166: | MEYWKHTNHGKDAGNELETATATHGNR | 78 | 63 |
| | 8427 | 6709-8427\|Organism: | LTNKITYILWTITLVLLSIVFIIVLINSIKSEK | | |
| | | Human respirovirus 3\|Strain | AHESLLQDINNEFMEVTEKIQVASDNTND | | |
| | | Name: ZMLS/ | LIQSGVNTRLLTIQSHVQNYIPISLTQQISDL | | |
| | | 2011\|Protein | RKFISEITIRNDNQEVPPQRITHDVGIKPLN | | |
| | | Name: hemagglutinin- | PDDFWRCTSGLPSLMRTPKIRLMPGPGLL | | |
| | | neuraminidase\|Gene | AMPTTVDGCVRTPSLVINDLIYAYTSNLIT | | |
| | | Symbol: HN | RGCQDIGKSYQVLQIGIITVNSDLVPDLNP | | |
| | | | RISHTFNINDNRKSCSLALLNTDVYQLCST | | |
| | | | PKVDERSDYASSGIEDIVLDIVNYDGSISTT | | |
| | | | RFKNNNISFDQPYAALYPSVGPGIYYKGKI | | |
| | | | IFLGYGGLEHPINENAICNTTGCPGKTQRD | | |
| | | | CNQASHSPWFSDRRMVNSIIVVDKGLNSV | | |
| | | | PKLKVWTISMRQNYWGSEGRLLLLGNKIY | | |
| | | | IYTRSTSWHSKLQLGIIDITDYSDIRIKWTW | | |
| | | | HNVLSRPGNNECPWGHSCPDGCITGVYTD | | |
| | | | AYPLNPTGSIVSSVILDSQKSRVNPVITYST | | |
| | | | ATERVNELAIRNKTLSAGYTTTSCITHYNK | | |
| | | | GYCFHIVEINHKSLNTFQPMLFKTEIPKSCS | | |
| KJ627396 | 6166- | gb: KJ627396: | MEVKVENIRAIDMLKARVKNRVARSKCF | 71 | 64 |
| | 6885 | 6166-6885\|Organism: | KNASLILIGITTLSIALNIYLIINYTIQKTTSE | | |
| | | Human | SEHHTSSPPTESNKETSTIPIDNPDITPNSQH | | |
| | | metapneumovirus\|Strain | PTQQSTESLTLYPASSMSPSETEPASTPGIT | | |
| | | Name: HMPV/Homo | NRLSLADRSTTQPSESRTKTNSTVHKKNK | | |
| | | sapiens/PER/FLI1305/2010/ | KNISSTISRTQSPPRTTAKAVSRTTALRMSS | | |
| | | A\|Protein | TGERPTTTSVQSDSSTTAQNHEETGPANPQ | | |
| | | Name: attachment | ASVSTM | | |
| | | glycoprotein G\|Gene | | | |
| | | Symbol: G | | | |
| AB475097 | 7079- | gb: AB475097: | MLSYQDKVGAFYKDNARANSSKLSLVTE | 45 | 65 |
| | 8902 | 7079-8902\|Organism: | EQGGRRPPYLLFVLLILLVGILALLAIAGV | | |
| | | Canine distemper | RFRQVSTSNVEFGRLLKDDLEKSEAVHHQ | | |
| | | virus\|Strain | VMDVLTPLFKIIGDEIGLRLPQKLNEIKQFI | | |
| | | Name: M25CR\|Protein | LQKTNFFNPNREFDFRDLHWCINPPSKIKV | | |
| | | Name:hemagglutinin\|Gene | NFTNYCDAIGVRKSIASAANPILLSALSGG | | |
| | | Symbol: H | RGDIFPPYRCSGATTSVGRVFPLSVSLSMS | | |
| | | | LISKTSEIISMLTAISDGVYGKTYLLVPDYI | | |
| | | | EREFDTQKIRVFEIGFIKRWLNDMPLLQTT | | |
| | | | NYMVLPENSKAKVCTIAVGELTLASLCVD | | |
| | | | ESTVLLYHDSNGSQDSILVVTLGIFGATPM | | |
| | | | NQVEEVIPVAHPSVERIHITNHRGFIKDSV | | |
| | | | ATWMVPALVSEQQEGQKNCLESACQRKS | | |
| | | | YPMCNQTSWEPFGGVQLPSYGRLTLPLDA | | |
| | | | SIDLQLNISFTYGPVILNGDGMDYYENPLL | | |
| | | | DSGWLTIPPKNGTILGLINKASRGDQFTVT | | |
| | | | PHVLTFAPRESSGNCYLPIQTSQIMDKDVL | | |
| | | | TESNLVVLPTQNFRYVVATYDISRENHAIV | | |
| | | | YYVYDPIRTISYTYPFRLTTKGRPDFLRIEC | | |
| | | | FVWDDDLWCHQFYRFESDITNSTTSVEDL | | |
| | | | VRIRFSCNRSKP | | |
| AJ849636 | 7326- | gb: AJ849636: | MSAQRERINAFYKDNPHNKNHRVILDRER | 34 | 66 |
| | 9155 | 7326-9155\|Organism: | LVIERPYILLGVLLVMFLSLIGLLAIAGIRL | | |
| | | Peste-des-petits- | HRATVGTSEIQSRLNTNIELTESIDHQTKD | | |
| | | ruminants virus\|Strain | VLTPLFKIIGDEVGIRIPQKFSDLVKFISDKI | | |
| | | Name: Turkey 2000\|Protein | KFLNPDREYDFRDLRWCMNPPERVKINFD | | |
| | | Name: haemagglutinin\|Gene | QFCEYKAAVKSIEHIFESPLNKSKKLQSLT | | |
| | | Symbol: H | LGPGTGCLGRTVTRAHFSELTLTLMDLDL | | |
| | | | EMKHNVSSVFTVVEEGLFGRTYTVWRSD | | |
| | | | ARDPSTDLGIGHFLRVFEIGLVRDLGLGPP | | |
| | | | VFHMTNYLTVNMSDDYRRCLLAVGELKL | | |
| | | | TALCSSSETVTLGERGVPKREPLVVVILNL | | |
| | | | AGPTLGGELYSVLPTSDLMVEKLYLSSHR | | |
| | | | GIIKDDEANWVVPSTDVRDLQNKGECLVE | | |
| | | | ACKTRPPSFCNGTGSGPWSEGRIPAYGVIR | | |
| | | | VSLDLASDPGVVITSVFGPLIPHLSGMDLY | | |
| | | | NNPFSRAVWLAVPPYEQSFLGMINTIGFPN | | |
| | | | RAEVMPHILTTEIRGPRGRCHVPIELSRRV | | |
| | | | DDDIKIGSNMVILPTIDLRYITATYDVSRSE | | |
| | | | HAIVYYIYDTGRSSSYFYPVRLNFKGNPLS | | |
| | | | LRIECFPWRHKVWCYHDCLIYNTITDEEV | | |
| | | | HTRGLTGIEVTCNPV | | |
| AB005795 | 6693- | gb: AB005795: | MDGDRSKRDSYWSTSPGGSTTKLVSDSER | 23 | 67 |
| | 8420 | 6693-8420\|Organism: | SGKVDTWLLILAFTQWALSIATVIICIVIAA | | |
| | | Sendai virus\|Strain | RQGYSMERYSMTVEALNTSNKEVKESLTS | | |
| | | Name: Ohita\|Protein | LIRQEVITRAANIQSSVQTGIPVLLNKNSRD | | |
| | | Name: hemagglutinin- | VIRLIEKSCNRQELTQLCDSTIAVHHAEGIA | | |
| | | neuraminidase protein\|Gene | PLEPHSFWRCPAGEPYLSSDPEVSLLPGPS | | |
| | | Symbol: HN | LLSGSTTISGCVRLPSLSIGEAIYAYSSNLIT | | |
| | | | QGCADIGKSYQVLQLGYISLNSDMFPDLN | | |
| | | | PVVSHTYDINDNRKSCSVVATGTRGYQLC | | |
| | | | SMPIVDERTDYSSDGIEDLVLDILDLKGRT | | |
| | | | KSHRYSNSEIDLDHPFSALYPSVGSGIATE | | |
| | | | GSLIFLGYGGLTTPLQGDTKCRIQGCQQVS | | |
| | | | QDTCNEALKITWLGGKQVVSVLIQVNDYL | | |
| | | | SERPRIRVTTIPITQNYLGAEGRLLKLGDQ | | |
| | | | VYIYTRSSGWHSQLQIGVLDVSHPLTISWT | | |
| | | | PHEALSRPGNEDCNWYNTCPKECISGVYT | | |
| | | | DAYPLSPDAANVATVTLYANTSRVNPTIM | | |
| | | | YSNTTNIINMLRIKDVQLEAAYTTTSCITHF | | |
| | | | GKGYCFHIIEINQKSLNTLQPMLFKTSIPKL | | |
| | | | CKAES | | |
| AF457102 | 6903- | gb: AF457102\| | MAEKGKTNSSYWSTTRNDNSTVNTHINTP | 21 | 68 |
| | 8630 | Organism: Human | AGRTHIWLLIATTMHTVLSFIIMILCIDLIIK | | |
| | | parainfluenza | QDTCMKTNIMTVSSMNESAKIIKETITELIR | | |
| | | virus 1 strain | QEVISRTINIQSSVQSGIPILLNKQSRDLTQL | | |
| | | Washington/1964\|Strain | IEKSCNRQELAQICENTIAIHHADGISPLDP | | |
| | | Name: Washington | HDFWRCPVGEPLLSNNPNISLLPGPSLLSG | | |
| | | 1964\|Protein | STTISGCVRLPSLSIGDAIYAYSSNLITQGC | | |
| | | Name: HN | ADIGKSYQVLQLGYISLNSDMYPDLNPVIS | | |
| | | glycoprotein\|Gene | HTYDINDNRKSCSVIAAGTRGYQLCSLPT | | |
| | | Symbol: HN | VNETTDYSSEGIEDLVFDILDLKGKTKSHR | | |
| | | | YKNEDITFDHPFSAMYPSVGSGIKIENTLIF | | |
| | | | LGYGGLTTPLQGDTKCVINRCTNVNQSVC | | |
| | | | NDALKITWLKKRQVVNVLIRINNYLSDRP | | |
| | | | KIVVETIPITQNYLGAEGRLLKLGKKIYIYT | | |
| | | | RSSGWHSNLQIGSLDINNPMTIKWAPHEV | | |
| | | | LSRPGNQDCNWYNRCPRECISGVYTDAYP | | |
| | | | LSPDAVNVATTTLYANTSRVNPTIMYSNT | | |
| | | | SEIINMLRLKNVQLEAAYTTTSCITHFGKG | | |
| | | | YCFHIVEINQASLNTLQPMLFKTSIPKICKI | | |
| | | | TS | | |
| KJ627397 | 6146- | gb: KJ627397: | MEVRVENIRAIDMFKAKMKNRIRSSKCYR | 21 | 69 |
| | 6888 | 6146-6888\|Organism: Human | NATLILIGLTALSMALNIFLIIDYATLKNMT | | |
| | | metapneumovirus\|Strain | KVEHCVNMPPVEPSKKSPMTSAADLNTKL | | |
| | | Name: HMPV/Homo sapiens/ | NPQQATQLTTEDSTSLAATSENHLHTETTP | | |
| | | PER/FPP00098/2010/ | TSDATISQQATDEHTTLLRPINRQTTQTTT | | |
| | | B\|Protein | EKKPTGATTKKDKEKETTTRTTSTAATQT | | |
| | | Name: attachment | LNTTNQTSNGREATTTSARSRNGATTQNS | | |
| | | glycoprotein G\|Gene | DQTIQAADPSSKPYHTQTNTTTAHNTDTSS | | |
| | | Symbol: G | LSS | | |
| AF017149 | 8913- | gb: AF017149\| | MMADSKLVSLNNNLSGKIKDQGKVIKNY | 14 | 70 |
| | 10727 | Organism: Hendra | YGTMDIKKINDGLLDSKILGAFNTVIALLG | | |
| | | virus\|Strain | SIIIIVMNIMIIQNYTRTTDNQALIKESLQSV | | |
| | | Name: UNKNOWN- | QQQIKALTDKIGTEIGPKVSLIDTSSTITIPA | | |
| | | AF017149\|Protein | NIGLLGSKISQSTSSINENVNDKCKFTLPPL | | |
| | | Name: glycoprotein\|Gene | KIHECNISCPNPLPFREYRPISQGVSDLVGL | | |
| | | Symbol: G | PNQICLQKTTSTILKPRLISYTLPINTREGVC | | |
| | | | ITDPLLAVDNGFFAYSHLEKIGSCTRGIAK | | |
| | | | QRIIGVGEVLDRGDKVPSMFMTNVWTPPN | | |
| | | | PSTIHHCSSTYHEDFYYTLCAVSHVGDPIL | | |
| | | | NSTSWTESLSLIRLAVRPKSDSGDYNQKYI | | |
| | | | AITKVERGKYDKVMPYGPSGIKQGDTLYF | | |
| | | | PAVGFLPRTEFQYNDSNCPIIHCKYSKAEN | | |
| | | | CRLSMGVNSKSHYILRSGLLKYNLSLGGDI | | |
| | | | ILQFIEIADNRLTIGSPSKIYNSLGQPVFYQA | | |
| | | | SYSWDTMIKLGDVDTVDPLRVQWRNNSV | | |
| | | | ISRPGQSQCPRFNVCPEVCWEGTYNDAFLI | | |
| | | | DRLNWVSAGVYLNSNQTAENPVFAVFKD | | |
| | | | NEILYQVPLAEDDTNAQKTITDCFLLENVI | | |
| | | | WCISLVEIYDTGDSVIRPKLFAVKIPAQCSES | | |
| AF212302 | 8943- | gb: AF212302\| | MPAENKKVRFENTTSDKGKIPSKVIKSYY | 14 | 71 |
| | 10751 | Organism: Nipah | GTMDIKKINEGLLDSKILSAFNTVIALLGSI | | |
| | | virus\|Strain | VIIVMNIMIIQNYTRSTDNQAVIKDALQGI | | |
| | | Name: UNKNOWN | QQQIKGLADKIGTEIGPKVSLIDTSSTITIPA | | |
| | | AF212302\|Protein | NIGLLGSKISQSTASINENVNEKCKFTLPPL | | |
| | | Name: attachment | KIHECNISCPNPLPFREYRPQTEGVSNLVG | | |
| | | glycoprotein\|Gene | LPNNICLQKTSNQILKPKLISYTLPVVGQSG | | |
| | | Symbol: G | TCITDPLLAMDEGYFAYSHLERIGSCSRGV | | |
| | | | SKQRIIGVGEVLDRGDEVPSLFMTNVWTP | | |
| | | | PNPNTVYHCSAVYNNEFYYVLCAVSTVG | | |
| | | | DPILNSTYWSGSLMMTRLAVKPKSNGGG | | |
| | | | YNQHQLALRSIEKGRYDKVMPYGPSGIKQ | | |
| | | | GDTLYFPAVGFLVRTEFKYNDSNCPITKC | | |
| | | | QYSKPENCRLSMGIRPNSHYILRSGLLKYN | | |
| | | | LSDGENPKVVFIEISDQRLSIGSPSKIYDSL | | |
| | | | GQPVFYQASFSWDTMIKFGDVLTVNPLVV | | |
| | | | NWRNNTVISRPGQSQCPRFNTCPEICWEG | | |
| | | | VYNDAFLIDRINWISAGVFLDSNQTAENPV | | |
| | | | FTVFKDNEILYRAQLASEDTNAQKTITNCF | | |
| | | | LLKNKIWCISLVEIYDTGDNVIRPKLFAVKI | | |
| | | | PEQCT | | |
| EU439428 | 6751- | gb: EU439428: | MEYWKHTNSTKDTNNELGTTRDRHSSKA | 14 | 72 |
| | 8638 | 6751-8638\|Organism: | TNIIMYIFWTTTSTILSVIFIMILINLIQENNH | | |
| | | Swine parainfluenza | NKLMLQEIKKEFAVIDTKIQKTSDDISTSIQ | | |
| | | virus 3\|Strain | SGINTRLLTIQSHVQNYIPLSLTQQMSDLR | | |
| | | Name: 92-7783_ISU- | KFINDLTTKREHQEVPIQRMTHDSGIEPLN | | |
| | | 92\|Protein | PDKFWRCTSGNPSLTSSPKIRLIPGPGLLAT | | |
| | | Name: hemagglutinin- | STTVNGCIRIPSLAINNLIYAYTSNLITQGC | | |
| | | neuraminidase HN\|Gene | QDIGKSYQVLQIGIITINSDLVPDLNPRVTH | | |
| | | Symbol: HN | TFNIDDNRKSCSLALLNTDVYQLCSTPKV | | |
| | | | DERSDYASTGIEDIVLDIVTSNGLIITTRFTN | | |
| | | | NNITFDKPYAALYPSVGPGIYYKDKVIFLG | | |
| | | | YGGLEHEENGDVICNTTGCPGKTQRDCNQ | | |
| | | | ASYSPWFSNRRMVNSIIVVDKSIDTTFSLR | | |
| | | | VWTIPMRQNYWGSEGRLLLLGDRIYIYTR | | |
| | | | STSWHSKLQLGVIDISDYNNIRINWTWHN | | |
| | | | VLSRPGNDECPWGHSCPDGCITGVYTDAY | | |
| | | | PLNPSGSVVSSVILDSQKSRENPIITYSTAT | | |
| | | | NRVNELAIYNRTLPAAYTTTNCITHYDKG | | |
| | | | YCFHIVEINHRSLNTFQPMLFKTEVPKNCS | | |
| KFS30164 | 6157- | gb: KF530164: | MEVRVENIRAIDMFKAKIKNRIRSSRCYRN | 14 | 73 |
| | 6906 | 6157-6906\|Organism: | ATLILIGLTALSMALNIFLIIDHATLRNMIK | | |
| | | Human | TENCANMPSAEPSKKTPMTSTAGPSTKPN | | |
| | | metapneumovirus\|Strain | PQQATQWTTENSTSPAATLEGHPYTGTTQ | | |
| | | Name: HMPV/AUS/172832788/ | TPDTTAPQQTTDKHTALPKSTNEQITQTTT | | |
| | | 2004/B\|Protein | EKKTTRATTQKREKRKENTNQTTSTAATQ | | |
| | | Name: attachment | TTNTTNQTRNASETITTSDGPRIDTTTQSSE | | |
| | | glycoprotein G\|Gene | QTARATEPGSSPYHARRGAGPR | | |
| | | Symbol: G | | | |
| AB910309 | 6960- | gb: AB910309: | MKNINIKYYKDSNRYLGKILDEHKIVNSQ | 12 | 74 |
| | 8747 | 6960-8747\|Organism: | LYSLSIKVITIIAIIVSLIATIMTIINATSGR | | |
| | | Feline | TTLNSNTDILLNQRDEIHSIHEMIFDRVYPLIT | | |
| | | morbillivirus\|Strain | AMSTELGLHIPTLLDELTKAIDQKIKIMNPP | | |
| | | Name: SS1\|Protein | VDTVTSDLSWCIKPPNGIIIDPKGYCESME | | |
| | | Name: hemagglutinin | LSKTYKLLLDQLDVSRKKSLTINRKNINQC | | |
| | | protein\|Gene Symbol: H | QLVDDSEIIFATVNIQSTPRFLNFGHTVSNQ | | |
| | | | RITFGQGTYSSTYILTIQEDGITDVQYRVFE | | |
| | | | IGYISDQFGVFPSLIVSRVLPIRMVLGMESC | | |
| | | | TLTSDRQGGYFLCMNTLTRSIYDYVNIRD | | |
| | | | LKSLYITLPHYGKVNYTYFNFGKIRSPHEI | | |
| | | | DKLWLTSDRGQIISGYFAAFVTITIRNYNN | | |
| | | | YPYKCLNNPCFDNSENYCRGWYKNITGT | | |
| | | | DDVPILAYLLVEMYDEEGPLITLVAIPPYN | | |
| | | | YTAPSHNSLYYDDKINKLIMTTSHIGYIQIN | | |
| | | | EVHEVIVGDNLKAILLNRLSDEHPNLTACR | | |
| | | | LNQGIKEQYKSDGMIISNSALIDIQERMYIT | | |
| | | | VKAIPPVGNYNFTVELHSRSNTSYILLPKQ | | |
| | | | FNAKYDKLHLECFNWDKSWWCALIPQFS | | |
| | | | LSWNESLSVDTAIFNLINCK | | |
| AB759118 | 7116- | gb: AB759118: | MASPSELNRSQATLYEGDPNSKRTWRTVY | 11 | 75 |
| | 8957 | 7116-8957\|Organism: | RASTLILDLAILCVSIVAIVRMSTLTPSDVT | | |
| | | Avian | DSISSSITSLSDTYQSVWSDTHQKVNSIFKE | | |
| | | paramyxovirus 6\|Strain | VGISIPVTLDKMQVEMGTAVNIITDAVRQL | | |
| | | Name: red-necked stint/ | QGVNGSAGFSITNSPEYSGGIDALIYPQKS | | |
| | | Japan/8KS0813/2008\|Protein | LNGKSLAISDLLEHPSFIPAPTTSHGCTRIPT | | |
| | | Name: hemagglutinin- | FHLGYRHWCYSHNTIESGCHDAGESIMYL | | |
| | | neuraminidase\|Gene | SMGAVGVGHQGKPVFTTSAAVILDDGKN | | |
| | | Symbol: HN | RKSCSVVANPNGCDVLCSLVKQTEDQDY | | |
| | | | ADPTPTPMIHGRLHFNGTYTESMLDQSLFT | | |
| | | | GHWVAQYPAVGSGSVSHGRLFFPLYGGIS | | |
| | | | KSSSLFPKLRAHAYFTHNEELECKNLTSKQ | | |
| | | | REDLFNAYMPGKIAGSLWAQGIVICNLTT | | |
| | | | LADCKIAVANTSTMMMAAEGRLQLVQDK | | |
| | | | VVLYQRSSSWWPVLIYYDILVSELVNARH | | |
| | | | LDIVNWVPYPQSKFPRPTWTKGLCEKPSIC | | |
| | | | PAVCVTGVYQDVWVVSVGDFSNETVVIG | | |
| | | | GYLEAASERKDPWIAAANQYNWLTRRQL | | |
| | | | FTAQTEAAYSSTTCFRNTHQDKVFCLTIM | | |
| | | | EVTDNLLGDWRIAPLLYEVTVVDRQQSSR | | |
| | | | KAVAMSEAHRTRFKYYSPENKFTPQH | | |
| AY141760 | 6791- | gb: AY141760\| | MDPKSYYCNEDLRSDGGEKSPGGDLYKGI | 8 | 76 |
| | 8485 | Organism: Fer-de-Lance | ILVSTVISLIIAIISLAFIIDNKINIQSLDPL | | |
| | | paramyxovirus\|Strain | RGLEDSYLVPIKDKSESISQDIQEGIFPRLNL | | |
| | | Name: ATCCVR-895\|Protein | ITAATTTTIPRSIAIQTKDLSDLIMNRCYPSVV | | |
| | | Name: hemagglutinin- | NNDTSCDVLAGAIHSNLFSQLDPSTYWTC | | |
| | | neuraminidase protein | SSGTPTMNQTVKLLPDNSQIPGSTYSTGCV | | |
| | | HN\|Gene Symbol: HN | RIPTFSLGSMIYSYSHNVIYEGCNDHSKSS | | |
| | | | QYWQLGYISTSKTGEPLQQVSRTLTLNNG | | |
| | | | LNRKSCSTVAQGRGAYLLCTNVVEDERT | | |
| | | | DYSTEGIQDLTLDYIDIFGAERSYRYTNNE | | |
| | | | VDLDRPYAALYPSVGSGTVYNDRILFLGY | | |
| | | | GGLMTPYGDQAMCQAPECTSATQEGCNS | | |
| | | | NQLIGYFSGRQIVNCIIEIITVGTEKPIIRVRT | | |
| | | | IPNSQVWLGAEGRIQTLGGVLYLYIRSSG | | |
| | | | WHALAQTGIILTLDPIRISWIVNTGYSRPG | | |
| | | | NGPCSASSRCPAQCITGVYTDIFPLSQNYG | | |
| | | | YLATVTLLSGVDRVNPVISYGTSTGRVAD | | |
| | | | SQLTSSSQVAAYTTTTCFTFNQKGYCYHII | | |
| | | | ELSPATLGIFQPVLVVTEIPKICS | | |
| EU877976 | 6248- | gb:EU877976: | MQGNMEGSRDNLTVDDELKTTWRLAYR | 8 | 77 |
| | 8161 | 6248-8161\|Organism: | VVSLLLMVSALIISIVILTRDNSQSIITAINQ | | |
| | | Avian | SSDADSKWQTGIEGKITSIMTDTLDTRNAA | | |
| | | paramyxovirus 4\|Strain | LLHIPLQLNTLEANLLSALGGNTGIGPGDL | | |
| | | Name: APMV-4/KR/YJ/ | EHCRYPVHDTAYLHGVNRLLINQTADYT | | |
| | | 06\|Protein | AEGPLDHVNFIPAPVTTTGCTRIPSFSVSSSI | | |
| | | Name: hemagglutinin- | WCYTHNVIETGCNDHSGSNQYISMGVIKR | | |
| | | neuraminidase\|Gene | AGNGLPYFSTVVSKYLTDGLNRKSCSVAA | | |
| | | Symbol: HN | GSGHCYLLCSLVSEPEPDDYVSPDPTPMRL | | |
| | | | GVLTWDGSYTEQAVPERIFKNIWSANYPG | | |
| | | | VGSGAIVGNKVLFPFYGGVRNGSTPEVMN | | |
| | | | RGRYYYIQDPNDYCPDPLQDQILRAEQSY | | |
| | | | YPTRFGRRMVMQGVLACPVSNNSTIASQC | | |
| | | | QSYYFNNSLGFIGAESRIYYLNGNIYLYQR | | |
| | | | SSSWWPHPQIYLLDSRIASPGTQNIDSGVN | | |
| | | | LKMLNVTVITRPSSGFCNSQSRCPNDCLFG | | |
| | | | VYSDIWPLSLTSDSIFAFTMYLQGKTTRID | | |
| | | | PAWALFSNHAIGHEARLFNKEVSAAYSTT | | |
| | | | TCFSDTIQNQVYCLSILEVRSELLGAFKIVP | | |
| | | | FLYRVL | | |
| AB176531 | 6821- | gb:AB176531: | MEDYSNLSLKSIPKRTCRIIFRTATILGICTL | 7 | 78 |
| | 8536 | 6821-8536\|Organism: | IVLCSSILHEIIHLDVSSGLMDSDDSQQGIIQ | | |
| | | Human parainfluenza | PIIESLKSLIALANQILYNVAIIIPLKIDSIETV | | |
| | | virus 2\|Strain | IFSALKDMHTGSMSNTNCTPGNLLLHDAA | | |
| | | Name: Nishio\|Protein | YINGINKFLVLKSYNGTPKYGPLLNIPSFIP | | |
| | | Name: hemagglutinin- | SATSPNGCTRIPSFSLIKTHWCYTHNVMLG | | |
| | | neuraminidase | DCLDFTTSNQYLAMGIIQQSAAAFPIFRTM | | |
| | | protein\|Gene Symbol: HN | KTIYLSDGINRKSCSVTAIPGGCVLYCYVA | | |
| | | | TRSEKEDYATTDLAELRLAFYYYNDTFIER | | |
| | | | VISLPNTTGQWATINPAVGSGIYHLGFILFP | | |
| | | | VYGGLISGTPSYNKQSSRYFIPKHPNITCA | | |
| | | | GNSSEQAAAARSSYVIRYHSNRLIQSAVLI | | |
| | | | CPLSDMHTARCNLVMFNNSQVMMGAEG | | |
| | | | RLYVIDNNLYYYQRSSSWWSASLFYRINT | | |
| | | | DFSKGIPPIIEAQWVPSYQVPRPGVMPCNA | | |
| | | | TSFCPANCITGVYADVWPLNDPEPTSQNA | | |
| | | | LNPNYRFAGAFLRNESNRTNPTFYTASAS | | |
| | | | ALLNTTGFNNTNHKAAYTSSTCFKNTGTQ | | |
| | | | KIYCLIIIEMGSSLLGEFQIIPFLRELIP | | |
| AF052755 | 6584- | gb: AF052755\| | MVAEDAPVRATCRVLFRTTTLIFLCTLLAL | 7 | 79 |
| | 8281 | Organism: Parainfluenza | SISILYESLITQKQIMSQAGSTGSNSGLGSIT | | |
| | | virus 5\|Strain | DLLNNILSVANQIIYNSAVALPLQLDTLES | | |
| | | Name: W3A\|Protein | TLLTAIKSLQTSDKLEQNCSWSAALINDNR | | |
| | | Name: hemagglutinin- | YINGINQFYFSIAEGRNLTLGPLLNMPSFIP | | |
| | | neuraminidase | TATTPEGCTRIPSFSLTKTHWCYTHNVILN | | |
| | | protein\|Gene Symbol: HN | GCQDHVSSNQFVSMGIIEPTSAGFPFFRTL | | |
| | | | KTLYLSDGVNRKSCSISTVPGGCMMYCFV | | |
| | | | STQPERDDYFSAAPPEQRIIIMYYNDTIVER | | |
| | | | IINPPGVLDVWATLNPGTGSGVYYLGWVL | | |
| | | | FPIYGGVIKGTSLWNNQANKYFIPQMVAA | | |
| | | | LCSQNQATQVQNAKSSYYSSWFGNRMIQ | | |
| | | | SGILACPLRQDLTNECLVLPFSNDQVLMG | | |
| | | | AEGRLYMYGDSVYYYQRSNSWWPMTML | | |
| | | | YKVTITFTNGQPSAISAQNVPTQQVPRPGT | | |
| | | | GDCSATNRCPGFCLTGVYADAWLLTNPSS | | |
| | | | TSTFGSEATFTGSYLNTATQRINPTMYIAN | | |
| | | | NTQIISSQQFGSSGQEAAYGHTTCFRDTGS | | |
| | | | VMVYCIYIIELSSSLLGQFQIVPFIRQVTLS | | |
| BK005918 | 6560- | gb: BK005918\| | MSQLGTDQIMHLAQPAIARRTWRLCFRIF | 7 | 80 |
| | 8290 | Organism: Porcine | ALFILIAIVITQIFMLTFDHTLLTTTQFLTSIG | | |
| | | rubulavirus\|Strain | NLQSTITSWTPDVQAMLSISNQLIYTTSITL | | |
| | | Name: UNKNOWN- | PLKISTTEMSILTAIRDHCHCPDCSSACPTR | | |
| | | BK005918\|Protein | QMLLNDPRYMSGVNQFIGAPTESINITFGP | | |
| | | Name: attachment | LFGIPSFIPTSTTTQGCTRIPSFALGPSHWCY | | |
| | | protein\|Gene Symbol: HN | THNFITAGCADGGHSNQYLAMGTIQSASD | | |
| | | | GSPLLITARSYYLSDGVNRKSCSIAVVPGG | | |
| | | | CAMYCYVATRSETDYYAGNSPPQQLLTL | | |
| | | | VFSNDTIIERTIHPTGLANGWVMLVPGVGS | | |
| | | | GTLYNEYLLFPAYGGMQQILANQSGEINQ | | |
| | | | FFTPYNATVRCAMAQPQFSQRAAASYYPR | | |
| | | | YFSNRWIRSAIVACPYRAIYQTQCTLIPLPN | | |
| | | | RMVMMGSEGRIFTLGDRLFYYQRSSSWW | | |
| | | | PYPLLYQVGLNFLTTPPSVSSMTQVPLEHL | | |
| | | | ARPGKGGCPGNSHCPATCVTGVYADVWP | | |
| | | | LTDPRSGVGGTSLVAAGGLDSTSERMAPV | | |
| | | | NYLAIGESLLSKTYLLSKTQPAAYTTTTCF | | |
| | | | RDTDTGKIYCITIAELGKVLLGEFQIVPFLR | | |
| | | | EIKIQSRY | | |
| EU338414 | 6015- | gb:EU338414: | MDFPSRENLAAGDISGRKTWRLLFRILTLS | 7 | 81 |
| | 7913 | 6015-7913\|Organism: | IGVVCLAINIATIAKLDHLDNMASNTWTTT | | |
| | | Avian paramyxovirus | EADRVISSITTPLKVPVNQINDMFRIVALDL | | |
| | | 2\|Strain | PLQMTSLQKEITSQVGFLAESINNVLSKNG | | |
| | | Name: APMV-2/Chicken/ | SAGLVLVNDPEYAGGIAVSLYQGDASAGL | | |
| | | California/Yucaipa/ | NFQPISLIEHPSFVPGPTTAKGCIRIPTFHMG | | |
| | | 56\|Protein | PSHWCYSHNIIASGCQDASHSSMYISLGVL | | |
| | | Name: hemagglutinin- | KASQTGSPIFLTTASHLVDDNINRKSCSIVA | | |
| | | neuraminidase\| | SKYGCDILCSIVIETENEDYRSDPATSMIIG | | |
| | | Gene Symbol: HN | RLFFNGSYTESKINTGSIFSLFSANYPAVGS | | |
| | | | GIVVGDEAAFPIYGGVKQNTWLFNQLKDF | | |
| | | | GYFTHNDVYKCNRTDIQQTILDAYRPPKIS | | |
| | | | GRLWVQGILLCPVSLRPDPGCRLKVFNTS | | |
| | | | NVMMGAEARLIQVGSTVYLYQRSSSWWV | | |
| | | | VGLTYKLDVSEITSQTGNTLNHVDPIAHTK | | |
| | | | FPRPSFRRDACARPNICPAVCVSGVYQDIW | | |
| | | | PISTATNNSNIVWVGQYLEAFYSRKDPRIG | | |
| | | | IATQYEWKVTNQLFNSNTEGGYSTTTCFR | | |
| | | | NTKRDKAYCVVISEYADGVFGSYRIVPQLI | | |
| | | | EIRTTTGKSE | | |
| KC403973 | 6234- | gb:KC403973: | MEVKVENIRTIDMLKARVKNRVARSKCF | 6 | 82 |
| | 6964 | 6234-6964\|Organism: | KNASLILIGITTLSIALNIYLIINYTMQENTS | | |
| | | Human | ESEHHTSSSPMESSRETPTVPIDNSDTNPSS | | |
| | | metapneumovirus\|Strain | QYPTQQSTEGSTLYFAASASSPETEPTSTP | | |
| | | Name: HMPV/USA/TN-82- | DTTSRPPFVDTHTTPPSASRTKTSPAVHTK | | |
| | | 518/1982/A\|Protein | NNPRISSRTHSPPWAMTRTVRRTTTLRTSS | | |
| | | Name: attachment | IRKRSSTASVQPDSSATTHKHEEASPVSPQ | | |
| | | glycoprotein G\|Gene | TSASTTRPQRKSMEASTSTTYNQTS | | |
| | | Symbol: G\|Segment: 8 | | | |
| KF015281 | 4511- | gb: KF015281: | MRPAEQLIQENYKLTSLSMGRNFEVSGST | 6 | 83 |
| | 5844 | 4511-5844\|Organism: | TNLNFERTQYPDTFRAVVKVNQMCKLIAG | | |
| | | Canine | VLTSAAVAVCVGVIMYSVFTSNHKANSM | | |
| | | pneumovirus\|Strain | QNATIRNSTSAPPQPTAGPPTTEQGTTPKF | | |
| | | Name: dog/Bari/100- | TKPPTKTTTHHEITEPAKMVTPSEDPYQCS | | |
| | | 12/ITA/2012\|Protein | SNGYLDRPDLPEDFKLVLDVICKPPGPEHH | | |
| | | Name: attachment | STNCYEKREINLGSVCPDLVTMKANMGL | | |
| | | protein\|Gene Symbol: G | NNGGGEEAAPYIEVITLSTYSNKRAMCVH | | |
| | | | NGCDQGFCFFLSGLSTDQKRAVLELGGQQ | | |
| | | | AIMELHYDSYWKHYWSNSNCVVPRTNCN | | |
| | | | LTDQTVILFPSFNNKNQSQCTTCADSAGLD | | |
| | | | NKFYLTCDGLSRNLPLVGLPSLSPQAHKA | | |
| | | | ALKQSTGTTTAPTPETRNPTPAPRRSKPLS | | |
| | | | RKKRALCGVDSSREPKPTMPYWCPMLQL | | |
| | | | FPRRSNS | | |
| KF973339 | 4624- | gb: KF973339: | MSKTKDQRAAKTLEKTWDTLNHLLFISSC | 6 | 84 |
| | 5310 | 4624-5310\|Organism: | LYKSNLKSIAQITLSILAMTIPTSLIIVATTFI | | |
| | | Respiratory syncytial | ASANNKVTPTTAIIQDATSQIKNTTPTHLT | | |
| | | virus type A\|Strain | QNPQPGISFFNLSGTISQTTAILAPTTPSVEP | | |
| | | Name: RSV-A/US/BID- | ILQSTTVKTKNTTTTQIQPSKLTTKQRQNK | | |
| | | V7358/2002\|Protein | PPNKPNDDFHFEVFNFVPCSICSNNPTCWA | | |
| | | Name: truncated attachment | ICKRIPSKKPGKKTTTKPTKKQTIKTTKKD | | |
| | | glycoprotein\|Gene | LKPQTTKPKEAPTT | | |
| | | Symbol: G | | | |
| FJ215864 | 6383- | gb: FJ215864: | MSNIASSLENIVEQDSRKTTWRAIFRWSVL | 5 | 85 |
| | 8116 | 6383-8116\|Organism: | LITTGCLALSIVSIVQIGNLKIPSVGDLADE | | |
| | | Avian | VVTPLKTTLSDTLRNPINQINDIFRIVALDIP | | |
| | | paramyxovirus 8\|Strain | LQVTSIQKDLASQFSMLIDSLNAIKLGNGT | | |
| | | Name: pintail/ | NLIIPTSDKEYAGGIGNPVFTVDAGGSIGFK | | |
| | | Wakuya/20/78\|Protein | QFSLIEHPSFIAGPTTTRGCTRIPTFHMSESH | | |
| | | Name: hemagglutinin- | WCYSHNIIAAGCQDASASSMYISMGVLHV | | |
| | | neuraminidase protein\|Gene | SSSGTPIFLTTASELIDDGVNRKSCSIVATQ | | |
| | | Symbol: HN | FGCDILCSIVIEKEGDDYWSDTPTPMRHGR | | |
| | | | FSFNGSFVETELPVSSMFSSFSANYPAVGS | | |
| | | | GEIVKDRILFPIYGGIKQTSPEFTELVKYGL | | |
| | | | FVSTPTTVCQSSWTYDQVKAAYRPDYISG | | |
| | | | RFWAQVILSCALDAVDLSSCIVKIMNSSTV | | |
| | | | MMAAEGRIIKIGIDYFYYQRSSSWWPLAF | | |
| | | | VTKLDPQELADTNSIWLTNSIPIPQSKFPRP | | |
| | | | SYSENYCTKPAVCPATCVTGVYSDIWPLT | | |
| | | | SSSSLPSIIWIGQYLDAPVGRTYPRFGIANQ | | |
| | | | SHWYLQEDILPTSTASAYSTTTCFKNTARN | | |
| | | | RVFCVTIAEFADGLFGEYRITPQLYELVRNN | | |
| JX857409 | 6619- | gb: JX857409: | MEETKVKTSEYWARSPQIHATNHPNVQN | 5 | 86 |
| | 8542 | 6619-8542\|Organism: | REKIKEILTILISFISSLSLVLVIAVLIMQSLH | | |
| | | Porcine | NGTILRCKDVGLESINKSTYSISNAILDVIK | | |
| | | parainfluenza | QELITRIINTQSSVQVALPILINKKIQDLSLII | | |
| | | virus 1\|Strain | EKSSKVHQNSPTCSGVAALTHVEGIKPLDP | | |
| | | Name:S206N\|Protein | DDYWRCPSGEPYLEDELTLSLIPGPSMLAG | | |
| | | Name: haemagglutinin | TSTIDGCVRLPSLAIGKSLYAYSSNLITKGC | | |
| | | protein\|Gene Symbol: H | QDIGKSYQVLQLGIITLNSDLHPDLNPIISH | | |
| | | | TYDINDNRKSCSVAVSETKGYQLCSMPRV | | |
| | | | NEKTDYTSDGIEDIVFDVLDLKGSSRSFKF | | |
| | | | SNNDINFDHPFSALYPSVGSGIIWKNELYF | | |
| | | | LGYGALTTALQGNTKCNLMGCPGATQDN | | |
| | | | CNKFISSSWLYSKQMVNVLIQVKGYLSSK | | |
| | | | PSIIVRTIPITENYVGAEGKLVGTRERIYIYT | | |
| | | | RSTGWHTNLQIGVLNINHPITITWTDHRVL | | |
| | | | SRPGRSPCAWNNKCPRNCTTGVYTDAYPI | | |
| | | | SPDANYVATVTLLSNSTRNNPTIMYSSSDR | | |
| | | | VYNMLRLRNTELEAAYTTTSCIVHFDRGY | | |
| | | | CFHIIEINQKELNTLQPMLFKTAIPKACRIS | | |
| | | | NL | | |
| KF908238 | 7510- | gb: KF908238: | MQDSRGNTQIFSQANSMVKRTWRLLFRIV | 5 | 87 |
| | 9249 | 7510-9249\|Organism: | TLILLISIFVLSLIIVLQSTPGNLQSDVDIIRK | | |
| | | Human parainfluenza | ELDELMENFETTSKSLLSVANQITYDVSVL | | |
| | | virus 4b\|Strain | TPIRQEATETNIIAKIKDHCKDRVVKGEST | | |
| | | Name: QLD- | CTLGHKPLHDVSFLNGFNKFYFTYRDNVQ | | |
| | | 01\|Protein | IRLNPLLDYPNFIPTATTPHGCIRIPSFSLSQ | | |
| | | Name: hemagglutinin- | THWCYTHNTILRGCEDTASSKQYVSLGTL | | |
| | | neuraminidase protein\|Gene | QTLENGDPYFKVEYSHYLNDRKNRKSCSV | | |
| | | Symbol: HN | VAVLDGCLLYCVIMTKNETENFKDPQLAT | | |
| | | | QLLTYISYNGTIKERIINPPGSSRDWVHISP | | |
| | | | GVGSGILYSNYIIFPLYGGLMENSMIYNNQ | | |
| | | | SGKYFFPNSTKLPCSNKTSEKITGAKDSYTI | | |
| | | | TYFSKRLIQSAFLICDLRQFLSEDCEILIPSN | | |
| | | | DHMLVGAEGRLYNIENNIFYYQRGSSWW | | |
| | | | PYPSLYRIKLNSNKKYPRIIEIKFTKIEIAPR | | |
| | | | PGNKDCPGNKACPKECITGVYQDIWPLSY | | |
| | | | PNTAFPHKKRAYYTGFYLNNSLARRNPTF | | |
| | | | YTADNLDYHQQERLGKFNLTAGYSTTTCF | | |
| | | | KQTTTARLYCLYILEVGDSVIGDFQIFPFLR | | |
| | | | SIDQAIT | | |
| KT071757 | 6066- | gb: KT071757: | MDALSRENLTEISQGGRRTWRMLFRILTL | 5 | 88 |
| | 7962 | 6066-7962\|Organism: | VLTLVCLAINIATIAKLDSIDTSKVQTWTT | | |
| | | Avian paramyxovirus | TESDRVIGSLTDTLKIPINQVNDMFRIVAL | | |
| | | 2\|Strain | DLPLQMTTLQKEIASQVGFLAESINNFLSK | | |
| | | Name: APMV-2/ | NGSAGSVLVNDPEYAGGIGTSLFHGDSAS | | |
| | | Emberizaspodocephala/ | GLDFEAPSLIEHPSFIPGPTTAKGCIRIPTFH | | |
| | | China/Daxing'anling/ | MSASHWCYSHNIIASGCQDAGHSSMYISM | | |
| | | 974/2013\|Protein | GVLKATQAGSPSFLTTASQLVDDKLNRKS | | |
| | | Name: hemagglutinin- | CSIISTTYGCDILCSLVVENEDADYRSDPPT | | |
| | | neuraminidase protein\|Gene | DMILGRLFFNGTYSESKLNTSAIFQLFSAN | | |
| | | Symbol: HN | YPAVGSGIVLGDEIAFPVYGGVKQNTWLF | | |
| | | | NQLKDYGYFAHNNVYKCNNSNIHQTVLN | | |
| | | | AYRPPKISGRLWSQVVLICPMRLFINTDCR | | |
| | | | IKVFNTSTVMMGAEARLIQVGSDIYLYQR | | |
| | | | SSSWWVVGLTYKLDFQELSSKTGNILNNV | | |
| | | | SPIAHAKFPRPSYSRDACARPNICPAVCVS | | |
| | | | GVYQDIWPISTAHNLSQVVWVGQYLEAF | | |
| | | | YARKDPWIGIATQYDWKKNVRLFNANTE | | |
| | | | GGYSTTTCFRNTKRDKAFCVIISEYADGVF | | |
| | | | GSYRIVPQLIEIRTTSKKGLPS | | |
| LC041132 | 6605- | gb: LC041132: | MQPGISEVSFVNDERSERGTWRLLFRILTI | 4 | 89 |
| | 8437 | 6605-8437\|Organism: | VLCLTSIGIGIPALIYSKEAATSGDIDKSLEA | | |
| | | Avian paramyxovirus | VKTGMSTLSSKIDESINTEQKIYRQVILEAP | | |
| | | goose/Shimane/67/ | VSQLNMESNILSAITSLSYQIDGTSNSSGCG | | |
| | | 2000\|Strain | SPMHDQDFVGGINKEIWTTDNVNLGEITL | | |
| | | Name: goose/Shimane/67/ | TPFLEHLNFIPAPTTGNGCTRIPSFDLGLTH | | |
| | | 2000\|Protein | WCYTHNVILSGCQDYSSSFQYIALGVLKIS | | |
| | | Name: hemagglutinin- | ATGHVFLSTMRSINLDDERNRKSCSISATSI | | |
| | | neuraminidase\| | GCDIICSLVTEREVDDYNSPAATPMIHGRL | | |
| | | Gene Symbol: HN | DFSGKYNEVDLNVGQLFGDWSANYPGVG | | |
| | | | GGSFLNGRVWFPIYGGVKEGTPTFKENDG | | |
| | | | RYAIYTRYNDTCPDSESEQVSRAKSSYRPS | | |
| | | | YFGGKLVQQAVLSIKIDDTLGLDPVLTISN | | |
| | | | NSITLMGAESRVLQIEEKLYFYQRGTSWFP | | |
| | | | SLIMYPLTVDDKMVRFEPPTIFDQFTRPGN | | |
| | | | HPCSADSRCPNACVTGVYTDGYPIVFHNN | | |
| | | | HSIAAVYGMQLNDVTNRLNPRSAVWYGV | | |
| | | | SMSNVIRVSSSTTKAAYTTSTCFKVKKTQ | | |
| | | | RVYCLSIGEIGNTLFGEFRIVPLLLEVYSEK | | |
| | | | GKSLKSSFDGWEDISINNPLRPLDNHRVDP | | |
| | | | ILISNYTSSWP | | |
| AF092942 | 4705- | gb: AF092942\| | MSNHTHHLKFKTLKRAWKASKYFIVGLS | 3 | 90 |
| | 5478 | Organism: Bovine | CLYKFNLKSLVQTALTTLAMITLTSLVITAI | | |
| | | respiratory | IYISVGNAKAKPTSKPTIQQTQQPQNHTSP | | |
| | | syncytial | FFTEHNYKSTHTSIQSTTLSQLPNTDTTRET | | |
| | | virus\|Strain | TYSHSINETQNRKIKSQSTLPATRKPPINPS | | |
| | | Name: ATue51908\|Protein | GSNPPENHQDHNNSQTLPYVPCSTCEGNL | | |
| | | Name: attachment | ACLSLCQIGPERAPSRAPTITLKKTPKPKTT | | |
| | | glycoprotein\|Gene | KKPTKTTIHHRTSPEAKLQPKNNTAAPQQ | | |
| | | Symbol: G | GILSSPEHHTNQSTTQI | | |
| AF326114 | 6691- | gb: AF326114\| | MWNSIPQLVSDHEEAKGKFTDIPLQDDTD | 3 | 91 |
| | 847 | Organism: Menangle | SQHPSGSKSTCRTLFRTVSIILSLVILVLGV | | |
| | | virus\|Strain | TSTMFSAKYSGGCATNSQLLGVSNLINQIQ | | |
| | | Name: UNKNOWN- | KSIDSLISEVNQVSITTAVTLPIKIMDFGKS | | |
| | | AF326114\|Protein | VTDQVTQMIRQCNTVCKGPGQKPGSQNV | | |
| | | Name: attachment | RIMPSNNLSTFQNINMSARGIAYQDVPLTF | | |
| | | protein\|Gene Symbol: HN | VRPIKNPQSCSRFPSYSVSFGVHCFANAVT | | |
| | | | DQTCELNQNTFYRVVLSVSKGNISDPSSLE | | |
| | | | TKAETRTPKGTPVRTCSIISSVYGCYLLCS | | |
| | | | KATVPESEEMKTIGFSQMFILYLSMDSKRII | | |
| | | | YDNIVSSTSAIWSGLYPGEGAGIWHMGQL | | |
| | | | FFPLWGGIPFLTPLGQKILNSTLDIPEVGSK | | |
| | | | CKSDLTSNPAKTKDMLFSPYYGENVMVF | | |
| | | | GFLTCYLLSNVPTNCHADYLNSTVLGFGS | | |
| | | | KAQFYDYRGIVYMYIQSAGWYPFTQIFRIT | | |
| | | | LQLKQNRLQAKSIKRIEVTSTTRPGNRECS | | |
| | | | VLRNCPYICATGLFQVPWIVNSDAITSKEV | | |
| | | | DNMVFVQAWAADFTEFRKGILSLCSQVSC | | |
| | | | PINDLLSKDNSYMRDTTTYCFPQTVPNILS | | |
| | | | CTSFVEWGGDSGNPINILEIHYEVIFVAS | | |
| GU206351 | 7500- | gb: GU206351: | MDKSYYTEPEDQRGNSRTWRLLFRLIVLT | 3 | 92 |
| | 9714 | 7500-9714\|Organism: | LLCLIACTSVSQLFYPWLPQVLSTLISLNSS | | |
| | | Avian | IITSSNGLKKEILNQNIKEDLIYREVAINIPL | | |
| | | paramyxovirus 5\|Strain | TLDRVTVEVGTAVNQITDALRQLQSVNGS | | |
| | | Name: budgerigar/ | AAFALSNSPDYSGGIEHLVFQRNTLINRSV | | |
| | | Kunitachi/74\|Protein | SVSDLIEHPSFIPTPTTQHGCTRIPTFHLGTR | | |
| | | Name: hemagglutinin | HWCYSHNIIGQGCADSGASMMYISMGAL | | |
| | | neuraminidase | GVSSLGTPTFTTSATSILSDSLNRKSCSIVA | | |
| | | protein\|Gene Symbol: HN | TTEGCDVLCSIVTQTEDQDYADHTPTPMI | | |
| | | | HGRLWFNGTYTERSLSQSLFLGTWAAQYP | | |
| | | | AVGSGIMTPGRVIFPFYGGVIPNSPLFLDLE | | |
| | | | RFALFTHNGDLECRNLTQYQKEAIYSAYK | | |
| | | | PPKIRGSLWAQGFIVCSVGDMGNCSLKVI | | |
| | | | NTSTVMMGAEGRLQLVGDSVMYYQRSSS | | |
| | | | WWPVGILYRLSLVDIIARDIQVVINSEPLPL | | |
| | | | SKFPRPTWTPGVCQKPNVCPAVCVTGVY | | |
| | | | QDLWAISAGETLSEMTFFGGYLEASTQRK | | |
| | | | DPWIGVANQYSWFMRRRLFKTSTEAAYSS | | |
| | | | STCFRNTRLDRNFCLLIFELTDNLLGDWRI | | |
| | | | VPLLFELTIV | | |
| JQ001776 | 8170- | gb: JQ001776: | MLSQLQKNYLDNSNQQGDKMNNPDKKL | 3 | 93 |
| | 10275 | 8170-10275\|Organism: | SVNFNPLELDKGQKDLNKSYYVKNKNYN | | |
| | | Cedar virus\|Strain | VSNLLNESLHDIKFCIYCIFSLLIIITIINIITI | | |
| | | Name: CG1a\|Protein | SIVITRLKVHEENNGMESPNLQSIQDSLSSLT | | |
| | | Name: attachment | NMINTEITPRIGILVTATSVTLSSSINYVGT | | |
| | | glycoprotein\|Gene | KTNQLVNELKDYITKSCGFKVPELKLHEC | | |
| | | Symbol: G | NISCADPKISKSAMYSTNAYAELAGPPKIF | | |
| | | | CKSVSKDPDFRLKQIDYVIPVQQDRSICMN | | |
| | | | NPLLDISDGFFTYIHYEGINSCKKSDSFKVL | | |
| | | | LSHGEIVDRGDYRPSLYLLSSHYHPYSMQ | | |
| | | | VINCVPVTCNQSSFVFCHISNNTKTLDNSD | | |
| | | | YSSDEYYITYFNGIDRPKTKKIPINNMTAD | | |
| | | | NRYIHFTFSGGGGVCLGEEFIIPVTTVINTD | | |
| | | | VFTHDYCESFNCSVQTGKSLKEICSESLRS | | |
| | | | PTNSSRYNLNGIMIISQNNMTDFKIQLNGIT | | |
| | | | YNKLSFGSPGRLSKTLGQVLYYQSSMSWD | | |
| | | | TYLKAGFVEKWKPFTPNWMNNTVISRPN | | |
| | | | QGNCPRYHKCPEICYGGTYNDIAPLDLGK | | |
| | | | DMYVSVILDSDQLAENPEITVFNSTTILYK | | |
| | | | ERVSKDELNTRSTTTSCFLFLDEPWCISVL | | |
| | | | ETNRFNGKSIRPEIYSYKIPKYC | | |
| KP271123 | 6644- | gb: KP271123: | MWSTQASKHPAMVNSATNLVDIPLDHPSS | 3 | 94 |
| | 8431 | 6644-8431\|Organism: | AQFPINRKRTGRLIYRLFSILCNLILISILISL | | |
| | | Teviot virus\|Strain | VVIWSRSSRDCAKSDGLSSVDNQLSSLSRS | | |
| | | Name: Geelong\|Protein | INSLITEVNQISVTTAINLPIKLSEFGKSVVD | | |
| | | Name: attachment | QVTQMIRQCNAACKGPGEKPGIQNVRINIP | | |
| | | protein\|Gene Symbol: HN | NNFSTYSELNRTANSLNFQSRTALFARPNP | | |
| | | | YPKTCSRFPSYSVYFGIHCFSHAVTDSSCE | | |
| | | | LSDSTYYRLVIGVADKNLSDPADVKYIGE | | |
| | | | TTTPVRVQTRGCSVVSSIYGCYLLCSKSNQ | | |
| | | | DYQDDFREQGFHQMFILFLSRELKTTFFDD | | |
| | | | MVSSTTVTWNGLYPGEGSGIWHMGHLVF | | |
| | | | PLWGGIRFGTHASEGILNSTLELPPVGPSC | | |
| | | | KRSLADNGLINKDVLFSPYFGDSVMVFAY | | |
| | | | LSCYMLSNVPTHCQVETMNSSVLGFGSRA | | |
| | | | QFYDLKGIVYLYIQSAGWFSYTQLFRLSLQ | | |
| | | | SKGYKLSVKQIKRIPISSTSRPGTEPCDIIHN | | |
| | | | CPYTCATGLFQAPWIVNGDSIRDRDVRNM | | |
| | | | AFVQAWSGAINTFQRPFMSICSQYSCPLSE | | |
| | | | LLDSESSIMRSTTTYCFPSLTESILQCVSFIE | | |
| | | | WGGPVGNPISINEVYSSISFRPD | | |
| AY286409 | 7644- | gb: AY286409\| | MVDPPAVSYYTGTGRNDRVKVVTTQSTN | 2 | 95 |
| | 9542 | Organism: Mossman | PYWAHNPNQGLRRLIDMVVNVIMVTGVIF | | |
| | | virus\|Strain | ALINIILGIVIISQSAGSRQDTSKSLDIIQHVD | | |
| | | Name: UNKNOWN- | SSVAITKQIVMENLEPKIRSILDSVSFQIPKL | | |
| | | AY286409\|Protein | LSSLLGPGKTDPPIALPTKASTPVIPTEYPSL | | |
| | | Name: attachment | NTTTCLRIEESVTQNAAALFNISFDLKTVM | | |
| | | glycoprotein\|Gene | YELVTRTGGCVTLPSYSELYTRVRTFSTAI | | |
| | | Symbol: G | RNPKTCQRAGQETDLNLIPAFIGTDTGILIN | | |
| | | | SCVRQPVIATGDGIYALTYLTMRGTCQDH | | |
| | | | RHAVRHFEIGLVRRDAWWDPVLTPIHHFT | | |
| | | | EPGTPVFDGCSLTVQNQTALALCTLTTDG | | |
| | | | PETDIHNGASLGLALVHFNIRGEFSKHKVD | | |
| | | | PRNIDTQNQGLHLVTTAGKSAVKKGILYS | | |
| | | | FGYMVTRSPEPGDSKCVTEECNQNNQEKC | | |
| | | | NAYSKTTLDPDKPRSMIIFQIDVGAEYFTV | | |
| | | | DKVVVVPRTQYYQLTSGDLFYTGEENDLL | | |
| | | | YQLHNKGWYNKPIRGRVTFDGQVTLHEH | | |
| | | | SRTYDSLSNQRACNPRLGCPSTCELTSMAS | | |
| | | | YFPLDKDFKAAVGVIALRNGMTPIITYSTD | | |
| | | | DWRNHWKYIKNADLEFSESSLSCYSPNPP | | |
| | | | LDDYVLCTAVITAKVMSNTNPQLLATSW | | |
| | | | YQYDKCHT | | |
| AY900001 | 7809- | gb: AY900001\| | MNPVAMSNFYGINQADHLREKGDQPEKG | 2 | 96 |
| | 9938 | Organism: J-virus\|Strain | PSVLTYVSLITGLLSLFTIIALNVTNIIYLTG | | |
| | | Name: UNKNOWN- | SGGTMATIKDNQQSMSGSMRDISGMLVE | | |
| | | AY900001\|Protein | DLKPKTDLINSMVSYTIPSQISAMSAMIKN | | |
| | | Name: attachment | EVLRQCTPSFMFNNTICPIAEHPVHTSYFEE | | |
| | | glycoprotein\|Gene | VGIEAISMCTGTNRKLVVNQGINFVEYPSF | | |
| | | Symbol: G | IPGSTKPGGCVRLPSFSLGLEVFAYAHAIT | | |
| | | | QDDCTSSSTPDYYFSVGRIADHGTDVPVFE | | |
| | | | TLAEWFLDDKMNRRSCSVTAAGKGGWL | | |
| | | | GCSILVGSFTDELTSPEVNRISLSYMDTFG | | |
| | | | KKKDWLYTGSEVRADQSWSALFFSVGSG | | |
| | | | VVIGDTVYFLVWGGLNHPINVDAMCRAP | | |
| | | | GCQSPTQSLCNYAIKPQEWGGNQIVNGIL | | |
| | | | HFKHDTNEKPTLHVRTLSPDNNWMGAEG | | |
| | | | RLFHFHNSGKTFIYTRSSTWHTLPQVGILT | | |
| | | | LGWPLSVQWVDITSISRPGQSPCEYDNRCP | | |
| | | | HQCVTGVYTDLFPLGVSYEYSVTAYLDQ | | |
| | | | VQSRMNPKIALVGAQEKIYEKTITTNTQH | | |
| | | | ADYTTTSCFAYKLRVWCVSIVEMSPGVIT | | |
| | | | TRQPVPFLYHLNLGCQDTSTGSLTPLDAH | | |
| | | | GGTYLNTDPVGNKVDCYFVLHEGQIYFG | | |
| | | | MSVGPINYTYSIVGRSREIGANMNVSLNQ | | |
| | | | LCHSVYTEFLKEKEHPGTRNNIDVEGWLL | | |
| | | | KRIETLNGTKIFGLDDLEGSGPGHQSGPED | | |
| | | | PSIAPIGHN | | |
| EF199772 | 6150- | gb: EF199772: | MEVKVENVGKSQELKVKVKNFIKRSDCK | 2 | 97 |
| | 6944 | 6150-6944\|Organism: | KKLFALILGLVSFELTMNIMLSVMYVESN | | |
| | | Avian | EALSLCRIQGTPAPRDNKTNTENATKETTL | | |
| | | metapneumovirus\|Strain | HTTTTTRDPEVRETKTTKPQANEGATNPS | | |
| | | Name: PL-2\|Protein | RNLTTKGDKHQTTRATTEAELEKQSKQTT | | |
| | | Name: attachment | EPGTSTQKHTPARPSSKSPTTTQATAQPTT | | |
| | | glycoprotein\|Gene | PTAPKASTAPKNRQATTKKTETDTTTASR | | |
| | | Symbol: G | ARNTNNPTETATTTPKATTETGKGKEGPT | | |
| | | | QHTTKEQPETTARETTTPQPRRTAGASPRAS | | |
| JF424833 | 5981- | gb: JF424833: 5981- | MGSKLYMVQGTSAYQTAVGFWLDIGRRY | 2 | 98 |
| | 7156 | 7156\|Organism: Avian | ILAIVLSAFGLTCTVTIALTVSVIVEQSVLE | | |
| | | metapneumovirus\|Strain | ECRNYNGGDRDWWSTTQEQPTTAPSATP | | |
| | | Name: IT/Ty/A/259-01/ | AGNYGGLQTARTRKSESCLHVQISYGDM | | |
| | | 03\|Protein | YSRSDTVLGGFDCMGLLVLCKSGPICQRD | | |
| | | Name: attachment | NQVDPTALCHCRVDLSSVDCCKVNKISTN | | |
| | | protein\|Gene | SSTTSEPQKTNPAWPSQDNTDSDPNPQGIT | | |
| | | Symbol: G | TSTATLLSTSLGLMLTSKTGTHKSGPPQAL | | |
| | | | PGSNTNGKTTTDRELGSTNQPNSTTNGQH | | |
| | | | NKHTQRMTLPPSYDNTRTILQHTTPWEKT | | |
| | | | FSTYKPTHSPTNESDQSLPTTQNSINCEHFD | | |
| | | | PQGKEKICYRVGSYNSNITKQCRIDVPLCS | | |
| | | | TYNTVCMKTYYTEPFNCWRRIWRCLCDD | | |
| | | | GVGLVEWCCTS | | |
| JN689227 | 7918- | gb: JN689227: | MSQLAAHNLAMSNFYGIHQGGQSTSQKE | 2 | 99 |
| | 12444 | 7918-12444\|Organism: | EEQPVQGVIRYASMIVGLLSLFTIIALNVTN | | |
| | | Tailam virus\|Strain | IIYMTESGGTMQSIKNAQGSIDGSMKDLSG | | |
| | | Name: TL8K\|Protein | TIMEDIKPKTDLINSMVSYNIPAQLSMIHQI | | |
| | | Name: attachment | IKNDVLKQCTPSFMFNNTICPLAENPTHSR | | |
| | | glycoprotein\|Gene | YFEEVNLDSISECSGNEMSLELGTEPEFIEY | | |
| | | Symbol: G | PSFAPGSTKPGSCVRLPSFSLSSTVFAYTHT | | |
| | | | IMGHGCSELDVGDHYLAIGRIADAGHEIPQ | | |
| | | | FETISSWFINDKINRRSCTVAAGVMETWM | | |
| | | | GCVIMTETFYDDLDSLDTGKITISYLDVFG | | |
| | | | RKKEWIYTRSEILYDYTYTSVYFSIGSGVV | | |
| | | | VGDTVYFLLWGSLSSPIEETAYCYAPGCS | | |
| | | | NYNQRMCNEAQRPAKFGHRQMANAILRF | | |
| | | | KTNSMGKPSISVRTLSPTVIPFGTEGRLIYS | | |
| | | | DFTKIIYLYLRSTSWYVLPLTGLLILGPPVS | | |
| | | | ISWVTQEAVSRPGEYPCGASNRCPKDCITG | | |
| | | | VYTDLFPLGARYEYAVTVYLNAETYRVN | | |
| | | | PTLALIDRSKIIARKKITTESQKAGYTTTTC | | |
| | | | FVFKLRIWCMSVVELAPATMTAFEPVPFL | | |
| | | | YQLDLTCKRNNGTTAMQFSGQDGMYKSG | | |
| | | | RYKSPRNECFFEKVSNKYYFVVSTPEGIQP | | |
| | | | YEVRDLTPERVSHVIMYISDVCAPALSAFK | | |
| | | | KLIPAMRPITTLTIGNWQFRPVDISGGLRV | | |
| | | | NIYRNLTRYGDLSMSAPEDPGTDTFPGTH | | |
| | | | APSKGHEEVGHYTLPNEKLSEVTTAAVKT | | |
| | | | KESLNLIPDTKDTRGEEENGSGLNEIITGHT | | |
| | | | TPGHIKTHPAETKVTKHTVIIPQIEEDGSGA | | |
| | | | TTSTELQDETGYHTEDYNTTNTNGSLTAP | | |
| | | | NERNNYTSGDHTVSGEDITHTITVSDRTKT | | |
| | | | TQTLPTDNTFNQTPTKIQEGSPKSESTPKD | | |
| | | | YTAIESEDSHFTDPTLIRSTPEGTIVQVIGD | | |
| | | | QFHSAVTQLGESNAIGNSEPIDQGNNLIPT | | |
| | | | TDRGTMDNTSSQSHSSTTSTQGSHSAGHG | | |
| | | | SQSNMNLTALADTDSVTDQSTSTQEIDHE | | |
| | | | HENVSSILNPLSRHTRVMRDTVQEALTGA | | |
| | | | WGFIRGMIP | | |
| KC562242 | 6178- | gb: KC562242: | MEVRVENIRAIDMFKAKIKNRIRNSRCYR | 2 | 100 |
| | 6926 | 6178-6926\|Organism: | NATLILIGLTALSMALNIFLIIDHATLRNMI | | |
| | | Human | KTENCANMPSAEPSKKTPMTSIAGPSTKPN | | |
| | | metapneumovirus\|Strain | PQQATQWTTENSTSPAATLEGHPYTGTTQ | | |
| | | Name: HMPV/USA/C1- | TPDTTAPQQTTDKHTALPKSTNEQITQTTT | | |
| | | 334/2004/B\|Protein | EKKTTRATTQKRKKEKKTQTKPQVQLQP | | |
| | | Name: attachment | KQPTPPTKSEMQVRQSQHPTDPELTPLPKA | | |
| | | glycoprotein G\|Gene | VNRQPGQQNQAPHHIMHGEVQDPGERNT | | |
| | | Symbol: G | QVSHPSS | | |
| KC915036 | 6154- | gb: KC915036: | MEVKIENVGKSQELRVKVKNFIKRSDCKK | 2 | 101 |
| | 7911 | 6154-7911\|Organism: | KLFALILGLISFDITMNIMLSVMYVESNEA | | |
| | | Avian metapneumovirus type | LSSCRVQGTPAPRDNRTNTENTAKETTLH | | |
| | | C\|Strain | TMTTTRNTEAGGTKTTKPQADERATSPSK | | |
| | | Name: GDY\|Protein | NPTIGADKHKTTRATTEAEQEKQSKQTTE | | |
| | | Name: attachment | PGTSTPKHIPARPSSKSPATTKTTTQPTTPT | | |
| | | glycoprotein\|Gene | VAKGGTAPKNRQTTTKKTEADTPTTSRAK | | |
| | | Symbol: G | QTNKPTGTETTPPRATTETDKDKEGPTQH | | |
| | | | TTKEQPETTAGGTTTPQPRRTTSRPAPTTN | | |
| | | | TKEGAETTGTRTTKSTQTSASPPRPTRSTPS | | |
| | | | KTATGTNKRATTTKGPNTASTDRRQQTRT | | |
| | | | TPKQDQQTQTKAKTTTNKAHAKAATTPE | | |
| | | | HNTDTTDSMKENSKEDKTTRDPSSKATTK | | |
| | | | QENTSKGTTATNLGNNTEAGARTPPTTTP | | |
| | | | TRHTTEPATSTAGGHTKARTTRWKSTAAR | | |
| | | | QPTRNNTTADTKTAQSKQTTPAQLGNNTT | | |
| | | | PENTTPPDNKSNSQTNVAPTEEIEIGSSLW | | |
| | | | RRRYVYGPCRENALEHPMNPCLKDNTTW | | |
| | | | IYLDNGRNLPAGYYDSKTDKIICYGIYRGN | | |
| | | | SYCYGRIECTCKNGTGLLSYCCNSYNWS | | |
| LC168749 | 7239- | gb: LC168749: | MSSPRDRVNAFYKDNLQFKNTRVVLNKE | 2 | 102 |
| | 9196 | 7239-9196\|Organism: | QLLIERPYMLLAVLFVMFLSLVGLLAIAGI | | |
| | | Rinderpest | RLHRAAVNTAEINSGLTTSIDITKSIEYQVK | | |
| | | morbillivirus\|Strain | DVLTPLFKIIGDEVGLRTPQRFTDLTKFISD | | |
| | | Name: Lv\|Protein Name: H | KIKFLNPDKEYDFRDINWCISPPERIKINYD | | |
| | | protein\|Gene Symbol: H | QYCAHTAAEELITMLVNSSLAGTAVLRTS | | |
| | | | LVNLGRSCTGSTTTKGQFSNMSLALSGIYS | | |
| | | | GRGYNISSMITITEKGMYGSTYLVGKHNQ | | |
| | | | GARRPSTAWQRDYRVFEVGIIRELGVGTP | | |
| | | | VFHMTNYLELPRQPELEICMLALGEFKLA | | |
| | | | ALCLADNSVALHYGGLRDDHKIRFVKLG | | |
| | | | VWPSPADSDTLATLSAVDPTLDGLYITTH | | |
| | | | RGIIAAGKAVWAVPVTRTDDQRKMGQCR | | |
| | | | REACREKPPPFCNSTDWEPLEAGRIPAYGI | | |
| | | | LTIRLGLADKPEIDIISEFGPLITHDSGMDL | | |
| | | | YTPLDGNEYWLTIPPLQNSALGTVNTLVL | | |
| | | | EPSLKISPNILTLPIRSGGGDCYTPTYLSDL | | |
| | | | ADDDVKLSSNLVILPSRNLQYVSATYDTS | | |
| | | | RVEHAIVYYIYSTGRLSSYYYPVKLPIKGD | | |
| | | | PVSLQIGCFPWGLKLWCHHFCSVIDSGTG | | |
| | | | KQVTHTGAVGIEITCNSR | | |
| LC187310 | 8144- | gb: LC187310: | MDSSQMNILDAMDRESSKRTWRGVFRVT | 2 | 103 |
| | 9871 | 8144-9871\|Organism: Avian | TIIMVVTCVVLSAITLSKVAHPQGFDTNEL | | |
| | | paramyxovirus 10\|Strain | GNGIVDRVSDKITEALTVPNNQIGEIFKIVA | | |
| | | Name: rAPMV-10- | LDLHVLVSSSQQAIAGQIGMLAESINSILSQ | | |
| | | FI324/YmHA\|Protein | NGSASTILSSSPEYAGGIGVPLFSNKLTNGT | | |
| | | Name: hemagglutinin- | VIKPITLIEHPSFIPGPTTIGGCTRIPTFHMAS | | |
| | | neuraminidase\|Gene | SHWCYSHNIIEKGCKDSGISSMYISLGVLQ | | |
| | | Symbol: HN | VLKKGTPVFLVTASAVLSDDRNRKSCSIIS | | |
| | | | SRFGCEILCSLVTEAESDDYKSDTPTGMVH | | |
| | | | GRLYFNGTYREGLVDTETIFRDFSANYPG | | |
| | | | VGSGEIVEGHIHFPIYGGVKQNTGLYNSLT | | |
| | | | PYWLDAKNKYDYCKLPYTNQTIQNSYKP | | |
| | | | PFIHGRFWAQGILSCELDLFNLGNCNLKIIR | | |
| | | | SDKVMMGAESRLMLVGSKLLMYQRASS | | |
| | | | WWPLGITQEIDIAELHSSNTTILREVKPILS | | |
| | | | SKFPRPSYQPNYCTKPSVCPAVCVTGVYT | | |
| | | | DMWPISITGNISDYAWISHYLDAPTSRQQP | | |
| | | | RIGIANQYFWIHQTTIFPTNTQSSYSTTTCF | | |
| | | | RNQVRSRMFCLSIAEFADGVFGEFRIVPLL | | |
| | | | YELRV | | |
| NC_004074 | 6590- | gb: NC_004074: | MWATSESKAPIPANSTLNLVDVPLDEPQTI | 2 | 104 |
| | 8563 | 6590-8563\|Organism: | TKHRKQKRTGRLVFRLLSLVLSLMTVILV | | |
| | | Tioman virus\|Strain | LVILASWSQKINACATKEGFNSLDLQISGL | | |
| | | Name: UNKNOWN- | VKSINSLITEVNQISITTAINLPIKLSDFGKSI | | |
| | | NC_004074\|Protein | VDQVTQMIRQCNAVCKGPGEKPGIQNIRI | | |
| | | Name: attachment | NIPNNFSTYLELNNTVKSIELQRRPALLAR | | |
| | | protein\|Gene Symbol: HN | PNPIPKSCSRFPSYSVNFGIHCFAHAITDQS | | |
| | | | CELSDKTYYRLAIGISDKNLSDPSDVKYIG | | |
| | | | EAFTPMGLQARGCSVISSIYGCYLLCSKSN | | |
| | | | QGYEADFQTQGFHQMYILFLSRDLKTTLF | | |
| | | | NDMISSTTVVWNGLYPGEGAGIWHMGYL | | |
| | | | IFPLWGGIKIGTPASTSILNSTLDLPLVGPSC | | |
| | | | KSTLEENNLINKDVLFSPYFGESVMVFGFL | | |
| | | | SCYMLSNVPTHCQVEVLNSSVLGFGSRSQ | | |
| | | | LMDLKGIVYLYIQSAGWYSYTQLFRLSLQ | | |
| | | | SRGYKLTVKQIRRIPISSTTRPGTAPCDVVH | | |
| | | | NCPYTCATGLFQAPWIVNGDSILDRDVRN | | |
| | | | LVFVQAWSGNFNTFQKGLISICNQYTCPLT | | |
| | | | TLLDNDNSIMRSTTTYCYPSLSEYNLQCQS | | |
| | | | FIEWGGPVGNPIGILEVHYIIKFK | | |
| NC_005283 | 7091- | gb: NC_005283: | MSSPRDKVDAFYKDIPRPRNNRVLLDNER | 2 | 105 |
| | 8905 | 7091-8905\|Organism: | VIIERPLILVGVLAVMFLSLVGLLAIAGVRL | | |
| | | Dolphin | QKATTNSIEVNRKLSTNLETTVSIEHHVKD | | |
| | | morbillivirus\|Strain | VLTPLFKIIGDEVGLRMPQKLTEIMQFISNK | | |
| | | Name: UNKNOWN- | IKFLNPDREYDFNDLHWCVNPPDQVKIDY | | |
| | | NC_005283\|Protein | AQYCNHIAAEELIVTKFKELMNHSLDMSK | | |
| | | Name: haemagglutinin | GRIFPPKNCSGSVITRGQTIKPGLTLVNIYT | | |
| | | protein\|Gene Symbol: H | TRNFEVSFMVTVISGGMYGKTYFLKPPEP | | |
| | | | DDPFEFQAFRIFEVGLVRDVGSREPVLQM | | |
| | | | TNFMVIDEDEGLNFCLLSVGELRLAAVCV | | |
| | | | RGRPVVTKDIGGYKDEPFKVVTLGIIGGGL | | |
| | | | SNQKTEIYPTIDSSIEKLYITSHRGIIRNSKA | | |
| | | | RWSVPAIRSDDKDKMEKCTQALCKSRPPP | | |
| | | | SCNSSDWEPLTSNRIPAYAYIALEIKEDSGL | | |
| | | | ELDITSNYGPLIIHGAGMDIYEGPSSNQDW | | |
| | | | LAIPPLSQSVLGVINKVDFTAGFDIKPHTLT | | |
| | | | TAVDYESGKCYVPVELSGAKDQDLKLES | | |
| | | | NLVVLPTKDFGYVTATYDTSRSEHAIVYY | | |
| | | | VYDTARSSSYFFPFRIKARGEPIYLRIECFP | | |
| | | | WSRQLWCHHYCMINSTVSNEIVVVDNLV | | |
| | | | SINMSCSR | | |
| NC_007803 | 7978- | gb: NC_007803: | MSQLAAHNLAMSNFYGTHQGDLSGSQKG | 2 | 106 |
| | 12504 | 7978-12504\|Organism: | EEQQVQGVIRYVSMIVSLLSLFTIIALNVTN | | |
| | | Beilong virus\|Strain | IIYMTESGGTMQSIKTAQGSIDGSMREISG | | |
| | | Name: Li\|Protein | VIMEDVKPKTDLINSMVSYNIPAQLSMIHQ | | |
| | | Name: attachment | IIKNDVPKQCTPSFMFNNTICPLAENPTHSR | | |
| | | glycoprotein\|Gene | YFEEVNLDSISECSGPDMHLGLGVNPEFIE | | |
| | | Symbol: G | FPSFAPGSTKPGSCVRLPSFSLSTTVFAYTH | | |
| | | | TIMGHGCSELDVGDHYFSVGRIADAGHEI | | |
| | | | PQFETISSWFINDKINRRSCTVAAGAMEA | | |
| | | | WMGCVIMTETFYDDRNSLDTGKLTISYLD | | |
| | | | VFGRKKEWIYTRSEILYDYTYTSVYFSVGS | | |
| | | | GVVVGDTVYFLIWGSLSSPIEETAYCFAPD | | |
| | | | CSNYNQRMCNEAQRPSKFGHRQMVNGIL | | |
| | | | KFKTTSTGKPLLSVGTLSPSVVPFGSEGRL | | |
| | | | MYSEITKIIYLYLRSTSWHALPLTGLFVLG | | |
| | | | PPTSISWIVQRAVSRPGEFPCGASNRCPKD | | |
| | | | CVTGVYTDLFPLGSRYEYAATVYLNSETY | | |
| | | | RVNPTLALINQTNIIASKKVTTESQRAGYT | | |
| | | | TTTCFVFKLRVWCISVVELAPSTMTAYEPI | | |
| | | | PFLYQLDLTCKGKNGSLAMRFAGKEGTY | | |
| | | | KSGRYKSPRNECFFEKVSNKYYFIVSTPEG | | |
| | | | IQPYEIRDLTPDRMPHIIMYISDVCAPALSA | | |
| | | | FKKLLPAMRPITTLTIGNWQFRPVEVSGGL | | |
| | | | RVNIGRNLTKEGDLTMSAPEDPGSNTFPG | | |
| | | | NHIPGNGILDAGYYTVEYPKE | | |
| NC_009489 | 6559- | gb: NC_009489: | MASLQSEPGSQKPHYQSDDQLVKRTWRS | 2 | 107 |
| | 8512 | 6559-8512\|Organism: | FFRFSVLVVTITSLALSIITLIGVNRISTAKQI | | |
| | | Mapuera virus\|Strain | SNAFAAIQANILSSIPDIRPINSLLNQLVYTS | | |
| | | Name: BeAnn 370284\|Protein | SVTLPLRISSLESNVLAAIQEACTYRDSQSS | | |
| | | Name: attachment | CSATMSVMNDQRYIEGIQVYSGSFLDLQK | | |
| | | protein\|Gene Symbol: HN | HTLSPPIAFPSFIPTSTTTVGCTRIPSFSLTKT | | |
| | | | HWCYTHNYIKTGCRDATQSNQYIALGTIY | | |
| | | | TDPDGTPGFSTSRSQYLNDGVNRKSCSISA | | |
| | | | VPMGCALYCFISVKEEVDYYKGTVPPAQT | | |
| | | | LILFFFNGTVHEHRIVPSSMNSEWVMLSPG | | |
| | | | VGSGVFYNNYIIFPLYGGMTKDKAEKRGE | | |
| | | | LTRFFTPKNSRSLCKMNDSVFSNAAQSAY | | |
| | | | YPPYFSSRWIRSGLLACNWNQIITTNCEILT | | |
| | | | FSNQVMMMGAEGRLILINDDLFYYQRSTS | | |
| | | | WWPRPLVYKLDIELNYPDSHIQRVDQVEV | | |
| | | | TFPTRPGWGGCVGNNFCPMICVSGVYQD | | |
| | | | VWPVTNPVNTTDSRTLWVGGTLLSNTTRE | | |
| | | | NPASVVTSGGSISQTVSWFNQTVPGAYST | | |
| | | | TTCFNDQVQGRIFCLIIFEVGGGLLGEYQIV | | |
| | | | PFLKELKYQGAVHA | | |
| NC_017937 | 6334- | gb: NC_017937: | MAPINYPASYYTNNAERPVVITTKSTESKG | 2 | 108 |
| | 8544 | 6334-8544\|Organism: | QRPLPLGNARFWEYFGHVCGTLTFCMSLI | | |
| | | Nariva virus\|Strain | GIIVGIIALANYSSDKDWKGRIGGDIQVTR | | |
| | | Name: UNKNOWN- | MATEKTVKLILEDTTPKLRNILDSVLFQLP | | |
| | | NC_017937\|Protein | KMLASIASKINTQTPPPPTTSGHSTALATQ | | |
| | | Name: attachment | CSSNCENRPEIGYDYLRQVEQSLQRITNISI | | |
| | | protein\|Gene Symbol: H | QLLEASEIHSMAGAYPNALYKIRTQDSWS | | |
| | | | VTAKECPLQAFQPNLNLIPAMIGTATGALI | | |
| | | | RNCVRQPVIVVDDGVYMLTYLAMRGSCQ | | |
| | | | DHQKSVRHFEMGVITSDPFGDPVPTPLRH | | |
| | | | WTKRALPAYDGCALAVKGHAGFALCTET | | |
| | | | SVGPLRDRTAKRKPNIVLFKASLVGELSER | | |
| | | | VIPPQSWLSGFSFFSVYTVAGKGYAYHSK | | |
| | | | FHAFGNVVRVGQSEYQAKCRGTGCPTAN | | |
| | | | QDDCNTAQRVSQEDNTYLHQAILSVDIDS | | |
| | | | VIDPEDVVYVIERDQYYQASAGDLYRVPE | | |
| | | | TGEILYNLHNGGWSNEVQVGRIQPSDRFY | | |
| | | | MREIQLTSTRVPAPNGCNRVKGCPGGCVA | | |
| | | | VISPAFTPMHPEFNVGVGIFPMNQPHNPSI | | |
| | | | MHVQQQTELFWKPIVGGNITLHESSIACYS | | |
| | | | TVPPNPSYDLCIGVMTLLLHQGQLPQFQA | | |
| | | | LSWYQPTMCNGNAPQNRRALIPVIVEDSK | | |
| | | | AMSVSSDAPRTP | | |
| NC_025256 | 9117- | gb: NC_025256: | MPQKTVEFINMNSPLERGVSTLSDKKTLN | 2 | 109 |
| | 11015 | 9117-11015\|Organism: | QSKITKQGYFGLGSHSERNWKKQKNQND | | |
| | | Bat Paramyxovirus | HYMTVSTMILEILVVLGIMFNLIVLTMVY | | |
| | | Eid_hel/GH-M74a/GHA/ | YQNDNINQRMAELTSNITVLNLNLNQLTN | | |
| | | 2009\|Strain | KIQREIIPRITLIDTATTITIPSAITYILATLTT | | |
| | | Name: BatPV/Eid_hel/GH- | RISELLPSINQKCEFKTPTLVLNDCRINCTP | | |
| | | M74a/GHA/2009\|Protein | PLNPSDGVKMSSLATNLVAHGPSPCRNFS | | |
| | | Name: glycoprotein\|Gene | SVPTIYYYRIPGLYNRTALDERCILNPRLTI | | |
| | | Symbol: G | SSTKFAYVHSEYDKNCTRGFKYYELMTFG | | |
| | | | EILEGPEKEPRMFSRSFYSPTNAVNYHSCT | | |
| | | | PIVTVNEGYFLCLECTSSDPLYKANLSNST | | |
| | | | FHLVILRHNKDEKIVSMPSFNLSTDQEYVQ | | |
| | | | IIPAEGGGTAESGNLYFPCIGRLLHKRVTH | | |
| | | | PLCKKSNCSRTDDESCLKSYYNQGSPQHQ | | |
| | | | VVNCLIRIRNAQRDNPTWDVITVDLTNTY | | |
| | | | PGSRSRIFGSFSKPMLYQSSVSWHTLLQVA | | |
| | | | EITDLDKYQLDWLDTPYISRPGGSECPFGN | | |
| | | | YCPTVCWEGTYNDVYSLTPNNDLFVTVY | | |
| | | | LKSEQVAENPYFAIFSRDQILKEFPLDAWIS | | |
| | | | SARTTTISCFMFNNEIWCIAALEITRLNDDII | | |
| | | | RPIYYSFWLPTDCRTPYPHTGKMTRVPLRS | | |
| | | | TYNY | | |
| NC_025347 | 6398- | gb: NC_025347: | MESIGKGTWRTVYRVLTILLDVVIIILSVIA | 2 | 110 |
| | 8418 | 6398-8418\|Organism: | LISLGLKPGERIINEVNGSIHNQLVPLSGITS | | |
| | | Avian | DIQAKVSSIYRSNLLSIPLQLDQINQAISSSA | | |
| | | paramyxovirus 7\|Strain | RQIADTINSFLALNGSGTFIYTNSPEFANGF | | |
| | | Name: APMV-7/dove/ | NRAMFPTLNQSLNMLTPGNLIEFTNFIPTP | | |
| | | Tennessee/4/75\|Protein | TTKSGCIRIPSFSMSSSHWCYTHNIIASGCQ | | |
| | | Name: hemagglutinin- | DHSTSSEYISMGVVEVTDQAYPNFRTTLSI | | |
| | | neuraminidase\|Gene | TLADNLNRKSCSIAATGFGCDILCSVVTET | | |
| | | Symbol: HN | ENDDYQSPEPTQMIYGRLFFNGTYSEMSL | | |
| | | | NVNQMFADWVANYPAVGSGVELADFVIF | | |
| | | | PLYGGVKITSTLGASLSQYYYIPKVPTVNC | | |
| | | | SETDAQQIEKAKASYSPPKVAPNIWAQAV | | |
| | | | VRCNKSVNLANSCEILTFNTSTMMMGAE | | |
| | | | GRLLMIGKNVYFYQRSSSYWPVGIIYKLD | | |
| | | | LQELTTFSSNQLLSTIPIPFEKFPRPASTAGV | | |
| | | | CSKPNVCPAVCQTGVYQDLWVLYDLGKL | | |
| | | | ENTTAVGLYLNSAVGRMNPFIGIANTLSW | | |
| | | | YNTTRLFAQGTPASYSTTTCFKNTKIDTAY | | |
| | | | CLSILELSDSLLGSWRITPLLYNITLSIMS | | |
| NC_025348 | 6590- | gb: NC_025348: | MPPVPTVSQSIDEGSFTDIPLSPDDIKHPLS | 2 | 111 |
| | 8548 | 6590-8548\|Organism: | KKTCRKLFRIVTLIGVGLISILTIISLAQQTG | | |
| | | Tuhoko virus 2\|Strain | ILRKVDSSDFQSYVQESFKQVLNLMKQFS | | |
| | | Name: UNKNOWN- | SNLNSLIEITSVTLPFRIDQFGTDIKTQVAQ | | |
| | | NC_025348\|Protein | LVRQCNAVCRGPIKGPTTQNIVYPALYETS | | |
| | | Name: hemagglutinin- | LNKTLETKNVRIQEVRQEVDPVPGPGLSN | | |
| | | neuraminidase\|Gene | GCTRNPSFSVYHGVWCYTHATSIGNCNGS | | |
| | | Symbol: HN | LGTSQLFRIGNVLEGDGGAPYHKSLATHL | | |
| | | | LTTRNVSRQCSATASYYGCYFICSEPVLTE | | |
| | | | RDDYETPGIEPITIFRLDPDGNWVVFPNINR | | |
| | | | FTEYSLKALYPGIGSGVLFQGKLIFPMYGG | | |
| | | | IDKERLSALGLGNIGLIERRMADTCNHTEK | | |
| | | | ELGRSFPGAFSSPYYHDAVMLNFLLICEMI | | |
| | | | ENLPGDCDLQILNPTNMSMGSESQLSVLD | | |
| | | | NELFLYQRSASWWPYTLIYRLNMRYTGK | | |
| | | | YLKPKSIIPMVIKSNTRPGYEGCNHERVCP | | |
| | | | KVCVTGVFQAPWILSIGRDHKERVSNVTY | | |
| | | | MVAWSMDKSDRTYPAVSVCGSDTCKLTV | | |
| | | | PLGDSKVHSAYSVTRCYLSRDHMSAYCL | | |
| | | | VIFELDARPWAEMRIQSFLYKLILT | | |
| NC_025350 | 6451- | gb: NC_025350: | MHNRTQSVSSIDTSSDVYLPRRKKAVTKF | 2 | 112 |
| | 8341 | 6451-8341\|Organism: | TFKKIFRVLILTLLLSIIIIIAVIFPKIDHIR | | |
| | | Tuhoko virus 3\|Strain | ETCDNSQILETITNQNSEIKNLINSAITNLNVL | | |
| | | Name: UNKNOWN- | LTSTTVDLPIKLNNFGKSIVDQVTMMVRQC | | |
| | | NC_025350\|Protein | NAVCRGPGDRPTQNIELFKGLYHTSPPSNT | | |
| | | Name: hemagglutinin- | STKLSMITEASNPDDIVPRPGKLLGCTRFPS | | |
| | | neuraminidase\|Gene | FSVHYGLWCYGHMASTGNCSGSSPSVQII | | |
| | | Symbol: HN | RIGSIGTNKDGTPKYVIIASASLPETTRLYH | | |
| | | | CSVTMTSIGCYILCTTPSVSETDDYSTMGIE | | |
| | | | KMSISFLSLDGYLTQLGQPTGLDNQNLYA | | |
| | | | LYPGPGSGVIFRDFLIFPMMGGIRLMDAQK | | |
| | | | MLNRNITYRGFPPSETCTESELKLKQEVAN | | |
| | | | MLTSPYYGEVLVLNFLYVCSLLDNIPGDC | | |
| | | | SVQLIPPDNMTLGAESRLYVLNGSLIMYK | | |
| | | | RGSSWWPYTELYQINYRVNNRAFRVRES | | |
| | | | VRINTTSTSRPGVQGCNLEKVCPKVCVSGI | | |
| | | | YQSPGIISAPVNPTRQEEGLLYFLVWTSSM | | |
| | | | SSRTGPLSSLCDHSTCRITYPIGDDTIFIGYT | | |
| | | | DSSCFMSSIKEGIYCIAFLELDNQPYSMMA | | |
| | | | IRSLSYIIN | | |
| NC_025352 | 8716- | gb: NC_025352: | MATNRDNTITSAEVSQEDKVKKYYGVET | 2 | 113 |
| | 11257 | 8716-11257\|Organism: | AEKVADSISGNKVFILMNTLLILTGAIITITL | | |
| | | Mojiang virus\|Strain | NITNLTAAKSQQNMLKIIQDDVNAKLEMF | | |
| | | Name: Tongguan1\|Protein | VNLDQLVKGEIKPKVSLINTAVSVSIPGQIS | | |
| | | Name: attachment | NLQTKFLQKYVYLEESITKQCTCNPLSGIF | | |
| | | glycoprotein\|Gene | PTSGPTYPPTDKPDDDTTDDDKVDTTIKPI | | |
| | | Symbol: G | EYPKPDGCNRTGDHFTMEPGANFYTVPNL | | |
| | | | GPASSNSDECYTNPSFSIGSSIYMFSQEIRK | | |
| | | | TDCTAGEILSIQIVLGRIVDKGQQGPQASPL | | |
| | | | LVWAVPNPKIINSCAVAAGDEMGWVLCS | | |
| | | | VTLTAASGEPIPHMFDGFWLYKLEPDTEV | | |
| | | | VSYRITGYAYLLDKQYDSVFIGKGGGIQK | | |
| | | | GNDLYFQMYGLSRNRQSFKALCEHGSCL | | |
| | | | GTGGGGYQVLCDRAVMSFGSEESLITNAY | | |
| | | | LKVNDLASGKPVIIGQTFPPSDSYKGSNGR | | |
| | | | MYTIGDKYGLYLAPSSWNRYLRFGITPDIS | | |
| | | | VRSTTWLKSQDPIMKILSTCTNTDRDMCP | | |
| | | | EICNTRGYQDIFPLSEDSEYYTYIGITPNNG | | |
| | | | GTKNFVAVRDSDGHIASIDILQNYYSITSA | | |
| | | | TISCFMYKDEIWCIAITEGKKQKDNPQRIY | | |
| | | | AHSYKIRQMCYNMKSATVTVGNAKNITIR | | |
| | | | RY | | |
| NC_025363 | 6503- | gb: NC_025363: | MESATSQVSFENDKTSDRRTWRAVFRVL | 2 | 114 |
| | 8347 | 6503-8347\|Organism: | MIILALSSLCVTVAALIYSAKAAIPGNIDAS | | |
| | | Avian | EQRILSSVEAVQVPVSRLEDTSQKIYRQVI | | |
| | | paramyxovirus 12\|Strain | LEAPVTQLNMETNILNAITSLSYQIDASAN | | |
| | | Name: Wigeon/Italy/3920_1/ | SSGCGAPVHDSDFTGGVGRELLQEAEVNL | | |
| | | 2005\|Protein | TIIRPSKFLEHLNFIPAPTTGNGCTRIPSFDL | | |
| | | Name: hemagglutinin- | GQTHWCYTHNVVLNGCRDRGHSFQYVA | | |
| | | neuraminidase\| | LGILRTSATGSVFLSTLRSVNLDDDRNRKS | | |
| | | Gene Symbol: HN | CSVSATPIGCEMLCSLVTETEEGDYDSIDP | | |
| | | | TPMVHGRLGFDGKYREVDLSEKEIFADW | | |
| | | | RANYPAVGGGAFFGNRVWFPVYGGLKEG | | |
| | | | TQSERDAEKGYAIYKRFNNTCPDDNTTQI | | |
| | | | ANAKASYRPSRFGGRFIQQGILSFKVEGNL | | |
| | | | GSDPILSLTDNSITLMGAEARVMNIENKLY | | |
| | | | LYQRGTSWFPSALVYPLDVANTAVKVRA | | |
| | | | PYIFDKFTRPGGHPCSASSRCPNVCVTGVY | | |
| | | | TDAYPLVFSRSHDIVAVYGMQLAAGTARL | | |
| | | | DPQAAIWYGNEMSTPTKVSSSTTKAAYTT | | |
| | | | STCFKVTKTKRIYCISIAEIGNTLFGEFRIVP | | |
| | | | LLIEVQKTPLTRRSELRQQMPQPPIDLVIDN | | |
| | | | PFCAPSGNLSRKNAIDEYANSWP | | |
| NC_025373 | 6619- | gb: NC_025373: | MEPTGSKVDIVPSQGTKRTCRTFYRLLILIL | 2 | 115 |
| | 8605 | 6619-8605\|Organism: | NLIIIILTIISIYVSISTDQHKLCNNEADSLLH | | |
| | | Avian paramyxovirus | SIVEPITVPLGTDSDVEDELREIRRDTGINIP | | |
| | | 3\|Strain | IQIDNTENIILTTLASINSNIARLHNATDESP | | |
| | | Name: turkey/Wisconsin/ | TCLSPVNDPRFIAGINKITKGSMIYRNFSNL | | |
| | | 68\|Protein | IEHVNFIPSPTTLSGCTRIPSFSLSKTHWCYS | | |
| | | Name: hemagglutinin\|Gene | HNVISTGCQDHAASSQYISIGIVDTGLNNE | | |
| | | Symbol: HN | PYLRTMSSRLLNDGLNRKSCSVTAGAGVC | | |
| | | | WLLCSVVTESESADYRSRAPTAMILGRFN | | |
| | | | FYGDYTESPVPASLFSGRFTANYPGVGSGT | | |
| | | | QLNGTLYFPIYGGVVNDSDIELSNRGKSFR | | |
| | | | PRNPTNPCPDPEVTQSQRAQASYYPTRFG | | |
| | | | RLLIQQAILACRISDTTCTDYYLLYFDNNQ | | |
| | | | VMMGAEARIYYLNNQMYLYQRSSSWWP | | |
| | | | HPLFYRFSLPHCEPMSVCMITDTHLILTYA | | |
| | | | TSRPGTSICTGASRCPNNCVDGVYTDVWP | | |
| | | | LTEGTTQDPDSYYTVFLNSPNRRISPTISIY | | |
| | | | SYNQKISSRLAVGSEIGAAYTTSTCFSRTD | | |
| | | | TGALYCITIIEAVNTIFGQYRIVPILVQLISD | | |
| NC_025386 | 7541- | gb: NC_025386: | MKAMHYYKNDFADPGTNDNSSDLTTNPF | 2 | 116 |
| | 9403 | 7541-9403\|Organism: | ISNQIKSNLSPPVLAEGHLSPSPIPKFRKILL | | |
| | | Salem virus\|Strain | TISFVSTIVVLTVILLVLTIRILTIIEASAGDE | | |
| | | Name: UNKNOWN- | KDIHTILSSLLNTFMNEYIPVFKNLVSIISLQ | | |
| | | NC_025386\|Protein | IPQMLIDLKTSSTQMMQSLKTFPRDLETLS | | |
| | | Name: attachment | TVTQSVAVLLEKAKSTIPDINKFYKNVGK | | |
| | | glycoprotein\|Gene | VTFNDPNIKVLTLEVPAWLPIVRQCLKQDF | | |
| | | Symbol: G | RQVISNSTGFALIGALPSQLFNEFEGYPSLA | | |
| | | | IVSEVYAITYLKGVMFENQENFLYQYFEIG | | |
| | | | TISPDGYNKPYFLRHTSVMLSTFKLSGKCT | | |
| | | | AAVDYRGGIFLCTPSPKIPKILQNPPDLPTL | | |
| | | | TVVSIPFDGRYTIRNISLMLTDEADIIYDLD | | |
| | | | TLQGRGVLQAMRFYALVRVISSSSPRHFPF | | |
| | | | CKNSWCPTADDKICDQSRRLGADGNYPV | | |
| | | | MYGLISIPAHSSYQGNVSLKLIDPKYYAYT | | |
| | | | RDASLFYNSMTDTYHYSFGTRGWVSRPII | | |
| | | | GELLLGDDIVLTRYTVRSVSRATAGDCTT | | |
| | | | VSMCPQACSGGMNSIFYPLNFDKPQVTGV | | |
| | | | AIRQYERQQEGIIVVTMNDHYYYSVPIIKN | | |
| | | | GTLLISSVTDCFWLMGDLWCMSLMEKNN | | |
| | | | LPLGVRSLAHLTWNIHWSCS | | |
| NC_025390 | 6647- | gb: NC_025390: | MESGISQASLVNDNIELRNTWRTAFRVVS | 2 | 117 |
| | 8386 | 6647-8386\|Organism: | LLLGFTSLVLTACALHFALNAATPADLSSI | | |
| | | Avian paramyxovirus | PVAVDQSHHEILQTLSLMSDIGNKIYKQV | | |
| | | 9\|Strain | ALDSPVALLNTESTLMSAITSLSYQINNAA | | |
| | | Name: duck/New York/22/ | NNSGCGAPVHDKDFINGVAKELFVGSQY | | |
| | | 1978\|Protein | NASNYRPSRFLEHLNFIPAPTTGKGCTRIPS | | |
| | | Name: hemagglutinin- | FDLAATHWCYTHNVILNGCNDHAQSYQY | | |
| | | neuraminidase\| | ISLGILKVSATGNVFLSTLRSINLDDDENRK | | |
| | | Gene Symbol: HN | SCSISATPLGCDLLCAKVTEREEADYNSDA | | |
| | | | ATRLVHGRLGFDGVYHEQALPVESLFSD | | |
| | | | WVANYPSVGGGSYFDNRVWFGVYGGIRP | | |
| | | | GSQTDLLQSEKYAIYRRYNNTCPDNNPTQI | | |
| | | | ERAKSSYRPQRFGQRLVQQAILSIRVEPSL | | |
| | | | GNDPKLSVLDNTVVLMGAEARIMTFGHV | | |
| | | | ALMYQRGSSYFPSALLYPLSLTNGSAAAS | | |
| | | | KPFIFEQYTRPGSPPCQATARCPNSCVTGV | | |
| | | | YTDAYPLFWSEDHKVNGVYGMMLDDITS | | |
| | | | RLNPVAAIFDRYGRSRVTRVSSSSTKAAYT | | |
| | | | TNTCFKVVKTKRVYCLSIAEIENTLFGEFRI | | |
| | | | TPLLSEIIFDPNLEPSDTSRN | | |
| NC_025403 | 6692- | gb: NC_025403: | MATNLSTITNGKFSQNSDEGSLTELPFFEH | 2 | 118 |
| | 8645 | 6692-8645\|Organism: | NRKVATTKRTCRFVFRSVITLCNLTILIVTV | | |
| | | Achimota virus 1\|Strain | VVLFQQAGFIKRTESNQVCETLQNDMHG | | |
| | | Name: UNKNOWN- | VVTMSKGVITTLNNLIEITSVNLPFQMKQF | | |
| | | NC_025403\|Protein | GQGIVTQVTQMVRQCNAVCKGPTIGPDIQ | | |
| | | Name: attachment | NIVYPASYESMIKHPVNNSNILLSEIRQPLN | | |
| | | protein\|Gene Symbol: HN | FVPNTGKLNGCTRTPSFSVYNGFWCYTHA | | |
| | | | ESDWNCNGSSPYMQVFRVGVVTSDYDYN | | |
| | | | VIHKTLHTKTSRLANVTYQCSTISTGYECY | | |
| | | | FLCSTPNVDEITDYKTPGIESLQIYKIDNRG | | |
| | | | TFAKFPITDQLNKELLTALYPGPGNGVLY | | |
| | | | QGRLLFPMHGGMQSSELNKVNLNNTVLS | | |
| | | | QFNDNKGCNATEIKLESEFPGTFTSPYYSN | | |
| | | | QVMLNYILICEMIENLPGNCDLQIVAPKN | | |
| | | | MSMGSESQLYSINNKLYLYQRSSSRWPYP | | |
| | | | LIYEVGTRLTNRQFRLRAINRFLIKSTTRPG | | |
| | | | SEGCNIYRVCPKVCVTGVYQAPWILHVSK | | |
| | | | AGSQSIAKVLYAVAWSKDHMSRKGPLFSI | | |
| | | | CDNDTCFLTKSLASEHVHSGYSITRCYLEN | | |
| | | | SERHIICVVIMELDASPWAEMRIQSVIYNIT | | |
| | | | LPS | | |
| NC_025404 | 6655- | gb: NC_025404: | MDNSMSISTISLDAQPRIWSRHESRRTWRN | 2 | 119 |
| | 8586 | 6655-8586\|Organism: | IFRITSLVLLGVTVIICIWLCCEVARESELEL | | |
| | | Achimotavirus 2\|Strain | LASPLGALIMAINTIKSSVVKMTTELNQVT | | |
| | | Name: UNKNOWN- | FTTSIILPNKVDQFGQNVVSQVAQLVKQC | | |
| | | NC_025404\|Protein | NAVCRGHQDTPELEQFINQKNPTWILQPN | | |
| | | Name: attachment | YTTKLTNLHEIDSIIPLVDYPGFSKSCTRFP | | |
| | | protein\|Gene Symbol: HN | SFSEGSKFWCFTYAVVKEPCSDISSSIQVV | | |
| | | | KYGAIKANHSDGNPYLVLGTKVLDDGKF | | |
| | | | RRGCSITSSLYGCYLLCSTANVSEVNDYA | | |
| | | | HTPAYPLTLELISKDGITTDLSPTYTVQLD | | |
| | | | KWSALYPGIGSGVIFKGYLMFPVYGGLPF | | |
| | | | KSPLISASWVGPGNKWPVDFSCSEDQYST | | |
| | | | FNFSNPYSALYSPHFSNNIVVSALFVCPLN | | |
| | | | ENLPYSCEVQVLPQGNLTIGAEGRLYVIDQ | | |
| | | | DLYYYQRSTSWWPYLQLYKLNIRITNRVF | | |
| | | | RVRSLSLLPIKSTTRPGYGNCTYFKLCPHIC | | |
| | | | VTGVYQSPWLISIRDKRPHEEKNILYFIGW | | |
| | | | SPDEQIRQNPLVSLCHETACFINRSLATNK | | |
| | | | THAGYSESHCVQSFERNKLTCTVFYELTA | | |
| | | | KPWAEMRVQSLLFQVDFL | | |
| NC_025410 | 6799- | gb: NC_025410: | MDSRSDSFTDIPLDNRIERTVTSKKTWRSIF | 2 | 120 |
| | 8869 | 6799-8869\|Organism: | RVTAIILLIICVVVSSISLNQHNDAPLNGAG | | |
| | | Tuhoko virus 1\|Strain | NQATSGFMDAIKSLEKLMSQTINELNQVV | | |
| | | Name: UNKNOWN- | MTTSVQLPNRITKFGQDILDQVTQMVRQC | | |
| | | NC_025410\|Protein | NAVCRGPGVGPSIQNYVIQGHAPTVSFDPI | | |
| | | Name: hemagglutinin- | SAEYQKFVFGITEKTLITAYHNPWECLRFP | | |
| | | neuraminidase\| | SQHLFDTTWCVSYQILTQNCSDHGPRITVI | | |
| | | Gene Symbol: HN | QLGEIMIANNLSTVFRDPVIKYIRHHIWLR | | |
| | | | SCSVVAYYSQCTIFCTSTNKSEPSDYADTG | | |
| | | | YEQLFLATLQSDGTFTEHSMHGVNIVHQW | | |
| | | | NAIYGGVGNGVIIGRNMLIPLYGGINYYD | | |
| | | | HNTTIVQTVDLRPYPIPDSCSQTDNYQTNY | | |
| | | | LPSMFTNSYYGTNLVVSGYLSCRLMAGTP | | |
| | | | TSCSIRVIPIENMTMGSEGQFYLINNQLYY | | |
| | | | YKRSSNWIRDTQVYLLSYSDKGNIIEITSA | | |
| | | | ERYIFKSVTSPDEGDCVTNHGCPSNCIGGL | | |
| | | | FQAPWILNDFKLCGSNITCPKIVTVWADQP | | |
| | | | DKRSNPMLSIAETDKLLLHKSYINYHTAV | | |
| | | | GYSTVLCFDSPKLNLKTCVVLQELMSDDK | | |
| | | | LLIRISYSIVSIMVE | | |
| NC_028249 | 7059- | gb: NC_028249: | MFSHQDKVGAFYKNNARANSSKLSLVTD | 2 | 121 |
| | 9010 | 7059-9010\|Organism: | EVEERRSPWFLSILLILLVGILILLAITGIRFH | | |
| | | Phocine distemper | QVVKSNLEFNKLLIEDMEKTKAVHHQVK | | |
| | | virus\|Strain | DVLTPLFKIIGDEVGLRLPQKLNEIKQFIVQ | | |
| | | Name: PDV/Wadden_Sea.NLD/ | KTNFFNPNREFDFRELHWCINPPSKVKVNF | | |
| | | 1988\|Protein | TQYCEITEFKEATRSVANSILLLTLYRGRD | | |
| | | Name: hemagglutinin | DIFPPYKCRGATTSMGNVFPLAVSLSMSLI | | |
| | | protein\|Gene Symbol: H | SKPSEVINMLTAISEGIYGKTYLLVTDDTE | | |
| | | | ENFETPEIRVFEIGFINRWLGDMPLFQTTN | | |
| | | | YRIISNNSNTKICTIAVGELALASLCTKESTI | | |
| | | | LLNLGDEESQNSVLVVILGLFGATHMDQL | | |
| | | | EEVIPVAHPSIEKIHITNHRGFIKDSVATWM | | |
| | | | VPALALSEQGEQINCLRSACKRRTYPMCN | | |
| | | | QTSWEPFGDKRLPSYGRLTLSLDVSTDLSI | | |
| | | | NVSVAQGPIIFNGDGMDYYEGTLLNSGWL | | |
| | | | TIPPKNGTILGLINQASKGDQFIVTPHILTFA | | |
| | | | PRESSTDCHLPIQTYQIQDDDVLLESNLVV | | |
| | | | LPTQSFEYVVATYDVSRSDHAIVYYVYDP | | |
| | | | ARTVSYTYPFRLRTKGRPDILRIECFVWDG | | |
| | | | HLWCHQFYRFQLDATNSTSVVENLIRIRFS | | |
| | | | CDRLDP | | |
| NC_028362 | 6951- | gb: NC_028362: | MEYWGHTNNPDKINRKVGVDQVRDRSKT | 2 | 122 |
| | 8675 | 6951-8675\|Organism: | LKIITFIISMMTSIMSTVALILILIMFIQNNNN | | |
| | | Caprine parainfluenza | NRIILQELRDETDAIEARIQKASNDIGVSIQ | | |
| | | virus 3\|Strain | SGINTRLLTIQNHVQNYIPLALTQQVSSLR | | |
| | | Name: JS2013\|Protein | ESINDVITKREETQSKMPIQRMTHDDGIEP | | |
| | | Name: hemagglutinin- | LIPDNFWKCPSGIPTISASPKIRLIPGPGLLA | | |
| | | neuraminidase\| | TSTTINGCIRLPSLVINNLIYAYTSNLITQGC | | |
| | | Gene Symbol: HN | QDIGKSYQVLQIGIITINSDLVPDLNPRITHT | | |
| | | | FDIDDNRKSCSLALRNADVYQLCSTPKVD | | |
| | | | ERSDYSSIGIEDIVLDIVTSEGTVSTTRFTN | | |
| | | | NNITFDKPYAALYPSVGPGIYYDNKIIFLG | | |
| | | | YGGLEHEENGDVICNITGCPGKTQHDCNQ | | |
| | | | ASYSPWFSNRRMVNAIILVNKGLNKVPSL | | |
| | | | QVWTIPMRQNYWGSEGRLLLLGNKIYIYT | | |
| | | | RSTSWHSKLQLGTLDISNYNDIRIRWTHH | | |
| | | | DVLSRPGSEECPWGNTCPRGCITGVYNDA | | |
| | | | YPLNPSGSVVSSVILDSRTSRENPIITYSTDT | | |
| | | | SRVNELAIRNNTLSAAYTTTNCVTHYGKG | | |
| | | | YCFHIIEINHKSLNTLQPMLFKTEIPKSCN | | |
| AB548428 | 5999- | gb: AB548428: | MGSELYIIEGVSSSEIVLKQVLRRSKKILLG | 1 | 123 |
| | 7261 | 5999-7261\|Organism: | LVLSALGLTLTSTIVISICISVEQVKLRQCV | | |
| | | Avian | DTYWAENGSLHPGQSTENTSTRGKTTTKD | | |
| | | metapneumovirus\|Strain | PRRLQATGAGKFESCGYVQVVDGDMHDR | | |
| | | Name: VCO3/60616\|Protein | SYAVLGGVDCLGLLALCESGPICQGDTWS | | |
| | | Name: attachment | EDGNFCRCTFSSHGVSCCKKPKSKATTAQ | | |
| | | glycoprotein\|Gene | RNSKPANSKSTPPVHSDRASKEHNPSQGE | | |
| | | Symbol: G | QPRRGPTSSKTTIASTPSTEDTAKPTISKPK | | |
| | | | LTIRPSQRGPSGSTKAASSTPSHKTNTRGTS | | |
| | | | KTTDQRPRTGPTPERPRQTHSTATPPPTTPI | | |
| | | | HKGRAPTPKPTTDLKVNPREGSTSPTAIQK | | |
| | | | NPTTQSNLVDCTLSDPDEPQRICYQVGTY | | |
| | | | NPSQSGTCNIEVPKCSTYGHACMATLYDT | | |
| | | | PFNCWRRTRRCICDSGGELIEWCCTSQ | | |
| AF079780 | 8118- | gb: AF079780\| | MDYHSHTTQTGSNETLYQDPLQSQSGSRD | 1 | 124 |
| | 10115 | Organism: Tupaia | TLDGPPSTLQHYSNPPPYSEEDQGIDGPQR | | |
| | | paramyxovirus\|Strain | SQPLSTPHQYDRYYGVNIQHTRVYNHLGT | | |
| | | Name: UNKNOWN- | IYKGLKLAFQILGWVSVIITMIITVTTLKKM | | |
| | | AF079780\|Protein | SDGNSQDSAMLKSLDENFDAIQEVANLLD | | |
| | | Name: hemagglutinin\|Gene | NEVRPKLGVTMTQTTFQLPKELSEIKRYLL | | |
| | | Symbol: H | RLERNCPVCGTEATPQGSKGNASGDTAFC | | |
| | | | PPCLTRQCSEDSTHDQGPGVEGTSRNHKG | | |
| | | | KINFPHILQSDDCGRSDNLIVYSINLVPGLS | | |
| | | | FIQLPSGTKHCIIDVSYTFSDTLAGYLIVGG | | |
| | | | VDGCQLHNKAIIYLSLGYYKTKMIYPPDYI | | |
| | | | AIATYTYDLVPNLRDCSIAVNQTSLAAICT | | |
| | | | SKKTKENQDFSTSGVHPFYIFTLNTDGIFT | | |
| | | | VTVIEQSQLKLDYQYAALYPATGPGIFIGD | | |
| | | | HLVFLMWGGLMTKAEGDAYCQASGCND | | |
| | | | AHRTSCNIAQMPSAYGHRQLVNGLLMLPI | | |
| | | | KELGSHLIQPSLETISPKINWAGGHGRLYY | | |
| | | | NWEINTTYIYIEGKTWRSRPNLGIISWSKPL | | |
| | | | SIRWIDHSVARRPGARPCDSANDCPEDCL | | |
| | | | VGGYYDMFPMSSDYKTAITIIPTHHQWPSS | | |
| | | | PALKLFNTNREVRVVMILRPPNNVKKTTIS | | |
| | | | CIRIMQTNWCLGFIIFKEGNNAWGQIYSYI | | |
| | | | YQVESTCPNTK | | |
| AY590688 | 6138- | gb: AY590688: | MEVKVENVGKSQELKVKVKNFIKRSDCK | 1 | 125 |
| | 7935 | 6138-7935\|Organism: | KKLFALILGLVSFELTMNIMLSVMYVESN | | |
| | | Avian | EALSLCRIQGTPAPRDNKTNTENATKETTL | | |
| | | metapneumovirus\|Strain | HTTTTTRDPEVRETKTTKPQANEGATNPS | | |
| | | Name: Colorado\|Protein | RNLTTKGDKHQTTRATTEAELEKQSKQTT | | |
| | | Name: attachment | EPGTSTQKHTPTRPSSKSPTTTQAIAQLTTP | | |
| | | glycoprotein\|Gene | TTPKASTAPKNRQATTKKTETDTTTASRA | | |
| | | Symbol: G | RNTNNPTETATTTPKATTETGKSKEGPTQ | | |
| | | | HTTKEQPETTAGETTTPQPRRTASRPAPTT | | |
| | | | KIEEEAETTKTRTTKSTQTSTGPPRPTGGA | | |
| | | | PSGAATEGSGRAAAAGGPSAASAGGRRRT | | |
| | | | EAAAERDRRTRAGAGPTAGGARARTAAA | | |
| | | | SERGADTAGSAGGGPGGDGATGGLSGGA | | |
| | | | PAEREDASGGTAAAGPGDGTEADGRAPP | | |
| | | | AAALAGRTTESAAGAAGDSGRAGTAGW | | |
| | | | GSAADGRSTGGNAAAEAGAAQSGRAAPR | | |
| | | | QPSGGTAPESTAPPNSGGSGRADAAPTEE | | |
| | | | VGVGSGLWRGRYVCGPCGESVPEHPMNP | | |
| | | | CFGDGTAWICSDDGGSLPAGCYDGGTDG | | |
| | | | VVCCGVCGGNSCCCGRVECTCGGGAGLL | | |
| | | | SCCCGSYSWS | | |
| EU403085 | 6620- | gb: EU403085: | MESPPSGKDAPAFREPKRTCRLCYRATTLS | 1 | 126 |
| | 8593 | 6620-8593\|Organism: | LNLTIVVLSIISIYVSTQTGANNSCVNPTIVT | | |
| | | Avian | PDYLTGSTTGSVEDLADLESQLREIRRDTG | | |
| | | paramyxovirus 3\|Strain | INLPVQIDNTENLILTTLASINSNLRFLQNA | | |
| | | Name: APMV3/PKT/ | TTESQTCLSPVNDPRFVAGINRIPAGSMAY | | |
| | | Netherland/449/75\|Protein | NDFSNLIEHVNFIPSPTTLSGCTRIPSFSLSK | | |
| | | Name: hemagglutinin- | THWCYTHNVISNGCLDHAASSQYISIGIVD | | |
| | | neuraminidase | TGLNNEPYFRTMSSKSLNDGLNRKSCSVT | | |
| | | protein\|Gene Symbol: HN | AAANACWLLCSVVTEYEAADYRSRTPTA | | |
| | | | MVLGRFDFNGEYTEIAVPSSLFDGRFASN | | |
| | | | YPGVGSGTQVNGTLYFPLYGGVLNGSDIE | | |
| | | | TANKGKSFRPQNPKNRCPDSEAIQSFRAQ | | |
| | | | DSYYPTRFGKVLIQQAIIACRISNKSCTDFY | | |
| | | | LLYFDNNRVMMGAEARLYYLNNQLYLY | | |
| | | | QRSSSWWPHPLFYSISLPSCQALAVCQITE | | |
| | | | AHLTLTYATSRPGMSICTGASRCPNNCVD | | |
| | | | GVYTDVWPLTKNDAQDPNLFYTVYLNNS | | |
| | | | TRRISPTISLYTYDRRIKSKLAVGSDIGAAY | | |
| | | | TTSTCFGRSDTGAVYCLTIMETVNTIFGQY | | |
| | | | RIVPILLRVTSR | | |
| FJ977568 | 6139- | gb: FJ977568: | MEVKVENVGKSQELKVKVKNFIKRSDCK | 1 | 127 |
| | 7936 | 6139-7936\|Organism: | KKLFALILGLVSFELTMNIMLSVMYVESN | | |
| | | Avian | EALSLCRIQGTPAPRDNKTNTENATKETTL | | |
| | | metapneumovirus\|Strain | HTTTTTRDPEVRETKTTKPQANEGATNPS | | |
| | | Name: aMPV/MN/turkey/2a/ | RNLTTKGDKHQTTRATTEAELEKQSKQTT | | |
| | | 97\|Protein | EPGTSTQKHTPARPSSKSPTTTQATAQPTT | | |
| | | Name: attachment | PTAPKASTAPKNRQATTKKTETDTTTASR | | |
| | | glycoprotein\|Gene | ARNTNNPTETATTTPKATTETGKGKEGPT | | |
| | | Symbol: G | QHTTKEQPETTARETTTPQPRRTASRPAPT | | |
| | | | TKIEEEAETTKTRTTKNTQTSTGPPRPTRST | | |
| | | | PSKTATENNKRTTTTKRPNTASTDSRQQT | | |
| | | | RTTAEQDQQTQTRAKPTTNGAHPQTTTTP | | |
| | | | EHNTDTTNSTKGSPKEDKTTRDPSSKTPTE | | |
| | | | QEDASKGTAAANPGGSAEADRRAPPATTP | | |
| | | | TGRTTESAAGTTGDDSGAETTRRRSAADR | | |
| | | | RPTGGSTAAEAGTAQSGRATPKQPSGGTA | | |
| | | | AGNTAPPNNESSGRADAAPAEEAGVGPSI | | |
| | | | RRGRHACGPRRESAPEHPTNPCPGDGTAW | | |
| | | | TRSDGGGNLPAGRHDSGADGAARRGARG | | |
| | | | GNPRRRGRAERTRGGGAGPPSCRCGSHNRS | | |
| HG934339 | 5997- | gb: HG934339: | MGAKLYAISGASDAQLMKKTCAKLLEKV | 1 | 128 |
| | 7166 | 5997-7166\|Organism: | VPIIILAVLGITGTTTIALSISISIERAVLSD | | |
| | | Avian metapneumovirus | CTTQLRNGTTSGSLSNPTRSTTSTAVTTRDIR | | |
| | | type D\|Strain | GLQTTRTRELKSCSNVQIAYGYLHDSSNP | | |
| | | Name: Turkey/1985/ | VLDSIGCLGLLALCESGPFCQRNYNPRDRP | | |
| | | Fr85.1\|Protein | KCRCTLRGKDISCCKEPPTAVTTSKTTPW | | |
| | | Name: attachment | GTEVHPTYPTQVTPQSQPATMAHQTATAN | | |
| | | glycoprotein\|Gene | QRSSTTEPVGSQGNTTSSNPEQQTEPPPSP | | |
| | | Symbol: G | QHPPTTTSQDQSTETADGQEHTPTRKTPTA | | |
| | | | TSNRRSPTPKRQETGRATPRNTATTQSGSS | | |
| | | | PPHSSPPGVDANMEGQCKELQAPKPNSVC | | |
| | | | KGLDIYREALPRGCDKVLPLCKTSTIMCV | | |
| | | | DAYYSKPPICFGYNQRCFCMETFGPIEFCC | | |
| | | | KS | | |
| JN032116 | 4659- | gb: JNO32116: | MSKNKNQRTARTLEKTWDTLNHLIVISSC | 1 | 129 |
| | 5252 | 4659-5252\|Organism: | LYKLNLKSIAQIALSVLAMIISTSLIIAAIIF | | |
| | | Respiratory syncytial | IISANHKVTLTTVTVQTIKNHTEKNITTYLTQ | | |
| | | virus\|Strain | VSPERVSPSKQPTTTPPIHTNSATISPNTKSE | | |
| | | Name: B/WI/629-12/06- | IHHTTAQTKGRTSTPTQNNKPNTKPRPKNP | | |
| | | 07\|Protein | PKKDDYHFEVFNFVPCSICGNNQLCKSICK | | |
| | | Name: attachment | TIPSNKPRKNQP | | |
| | | glycoprotein\|Gene | | | |
| | | Symbol: G | | | |
| KX258200 | 6254- | gb: KX258200: | MEGSRTVIYQGDPNEKNTWRLVFRTLTLI | 1 | 130 |
| | 7996 | 6254-7996\|Organism: | LNLAILSVTIASIIITSKITLSEVTTLKTEGVE | | |
| | | Avian paramyxovirus | EVITPLMATLSDSVQQEKMIYKEVAISIPL | | |
| | | 14\|Strain | VLDKIQTDVGTSVAQITDALRQIQGVNGT | | |
| | | Name: APMV14/duck/Japan/ | QAFALSNAPEYSGGIEVPLFQIDSFVNKSM | | |
| | | 11OG0352/2011\|Protein | SISGLLEHASFIPSPTTLHGCTRIPSFHLGPR | | |
| | | Name: hemagglutinin- | HWCYTHNIIGSRCRDEGFSSMYISIGAITV | | |
| | | neuraminidase | NRDGNPLFITTASTILADDNNRKSCSIIASS | | |
| | | protein\|Gene Symbol: HN | YGCDLLCSIVTESENDDYANPNPTKMVHG | | |
| | | | RFLYNGSYVEQALPNSLFQDKWVAQYPG | | |
| | | | VGSGITTHGKVLFPIYGGIKKNTQLFYELS | | |
| | | | KYGFFAHNKELECKNMTEEQIRDIKAAYL | | |
| | | | PSKTSGNLFAQGIIYCNISKLGDCNVAVLN | | |
| | | | TSTTMMGAEGRLQMMGEYVYYYQRSSS | | |
| | | | WWPVGIVYKKSLAELMNGINMEVLSFEPI | | |
| | | | PLSKFPRPTWTAGLCQKPSICPDVCVTGVY | | |
| | | | TDLFSVTIGSTTDKDTYFGVYLDSATERKD | | |
| | | | PWVAAADQYEWRNRVRLFESTTEAAYTT | | |
| | | | STCFKNTVNNRVFCVSIVELRENLLGDWK | | |
| | | | IVPLLFQIGVSQGPPPK | | |
| KX940961 | 7978- | gb: KX940961: | MSQLAAHNLAMSNFYGTHQGDLSGSQKG | 1 | 131 |
| | 12504 | 7978-12504\|Organism: | EEQQVQGVIRYVSMIVGLLSLFTIIALNVT | | |
| | | Beilong virus\|Strain | NIIYMTESGGTMQSIKTAQGSIDGSMREIS | | |
| | | Name: | GVIMEDVKPKTDLINSMVSYNIPAQLSMIH | | |
| | | ERN081008_1S\|Protein | QIIKNDVLKQCTPSFMFNNTICPLAENPTH | | |
| | | Name: attachment | SRYFEEVNLDSISECSGPDMHLGLGVNPEF | | |
| | | glycoprotein\|Gene | IEFPSFAPGSTKPGSCVRLPSFSLSTTVFAY | | |
| | | Symbol: G | THTIMGHGCSELDVGDHYFSVGRIADAGH | | |
| | | | EIPQFETISSWFINDKINRRSCTVAAGAME | | |
| | | | AWMGCVIMTETFYDDLNSLDTGKLTISYL | | |
| | | | DVFGRKKEWIYTRSEILYDYTYTSVYFSV | | |
| | | | GSGVVVGDTVYFLIWGSLSSPIEETAYCFA | | |
| | | | PDCSNYNQRMCNEAQRPSKFGHRQMVNG | | |
| | | | ILKFKTTSTGKPLLSVGTLSPSVVPFGSEGR | | |
| | | | LMYSEITKIIYLYLRSTSWHALPLTGLFVL | | |
| | | | GPPTSISWIVQRAVSRPGEFPCGASNRCPK | | |
| | | | DCVTGVYTDLFPLGSRYEYAATVYLNSET | | |
| | | | YRVNPTLALINQTNIIASKKVTTESQRAGY | | |
| | | | TTTTCFVFKLRVWCISVVELAPSTMTAYEP | | |
| | | | IPFLYQLDLTCKGKNGSLAMRFTGKEGTY | | |
| | | | KSGRYKSPRNECFFEKVSNKYYFIVSTPEG | | |
| | | | IQPYEIRDLTPDRMPHIIMYISDVCAPALSA | | |
| | | | FKKLLPAMRPITTLTIGNWQFRPVEVSGGL | | |
| | | | RVSIGRNLTKEGDLTMSAPEDPGSNTFPGG | | |
| | | | HIPGNGLFDAGYYTVEYPKEWKQTTPKPS | | |
| | | | EGGNIIDKNKTPVIPSRDNPTSDSSIPHRESI | | |
| | | | EPVRPTREVLKSSDYVTIVSTDSGSGSGDF | | |
| | | | ATGVPWTGVSPKAPQNGINLPGTELPHPT | | |
| | | | VLDRINTPAPSDPKVSADSDHTRDTIDPTA | | |
| | | | LSKPLNHDTTGDTDTRINTGTATYGFTPGR | | |
| | | | EATSSGKLANDLTNSTSVPSEAHPSASTSE | | |
| | | | ASKPEKNTDNRVTQDPTSGTAERPTTNAP | | |
| | | | VDGKHSTQLTDARPNTADPERTSQHSSST | | |
| | | | TRDEVKPSLPSTTEASTHQRTEAATPPELV | | |
| | | | NNTLNPPSTQVRSVRSLMQDAIAQAWNFV | | |
| | | | RGVTP | | |
| KY511044 | 6454- | gb: KY511044: | MERGISEVALANDRTEEKNTWRLIFRITVL | 1 | 132 |
| | 8310 | 6454-8310\|Organism: | VVSVITLGLTAASLVYSMNAAQPADFDGII | | |
| | | Avian paramyxovirus | PAVQQVGTSLTNSIGGMQDVLDRTYKQV | | |
| | | UPO216\|Strain | ALESPLTLLNMESTIMNAITSLSYKINNGG | | |
| | | Name: APMV-15/WB/Kr/ | NSSGCGAPIHDPEYIGGIGKELLIDDNVDV | | |
| | | UPO216/2014\|Protein | TSFYPSAFKEHLNFIPAPTTGAGCTRIPSFD | | |
| | | Name: hemagglutinin- | LSATHYCYTHNVILSGCQDHSHSHQYIAL | | |
| | | neuraminidase | GVLKLSDTGNVFFSTLRSINLDDTANRKSC | | |
| | | protein\|Gene Symbol: HN | SISATPLGCDILCSKVTETELEDYKSEEPTP | | |
| | | | MVHGRLSFDGTYSEKDLDVNNLFSDWTA | | |
| | | | NYPSVGGGSYIGNRVWYAVYGGLKPGSN | | |
| | | | TDQSQRDKYVIYKRYNNTCPDPEDYQINK | | |
| | | | AKSSYTPSYFGSKRVQQAILSIAVSPTLGS | | |
| | | | DPVLTPLSNDVVLMGAEGRVMHIGGYTY | | |
| | | | LYQRGTSYYSPALLYPLNIQDKSATASSPY | | |
| | | | KFDAFTRPGSVPCQADARCPQSCVTGVYT | | |
| | | | DPYPLIFAKDHSIRGVYGMMLNDVTARLN | | |
| | | | PIAAVFSNISRSQITRVSSSSTKAAYTTSTCF | | |
| | | | KVIKTNRIYCMSIAEISNTLFGEFRIVPLLV | | |
| | | | EILSNGGNTARSAGGTPVKESPKGWSDAI | | |
| | | | AEPLFCTPTNVTRYNADIRRYAYSWP | | |
| NC_025360 | 8127- | gb: NC_025360: | MPPAPSPVHDPSSFYGSSLFNEDTASRKGT | 1 | 133 |
| | 10158 | 8127-10158\|Organism: | SEEIHLLGIRWNTVLIVLGLILAIIGIGIGASS | | |
| | | Atlantic salmon | FSASGITGNTTKEIRLIVEEMSYGLVRISDS | | |
| | | paramyxovirus\|Strain | VRQEISPKVTLLQNAVLSSIPALVTTETNTI | | |
| | | Name: ASPV/Yrkje371/ | INAVKNHCNSPPTPPPPTEAPLKKHETGMA | | |
| | | 95\|Protein | PLDPTTYWTCTSGTPRFYSSPNATFIPGPSP | | |
| | | Name: hemagglutinin- | LPHTATPGGCVRIPSMHIGSEIYAYTSNLIA | | |
| | | neuraminidase | SGCQDIGKSYQNVQIGVLDRTPEGNPEMS | | |
| | | protein\|Gene Symbol: HN | PMLSHTFPINDNRKSCSIVTLKRAAYIYCS | | |
| | | | QPKVTEFVDYQTPGIEPMSLDHINANGTT | | |
| | | | KTWIYSPTEVVTDVPYASMYPSVGSGVVI | | |
| | | | DGKLVFLVYGGLLNGIQVPAMCLSPECPG | | |
| | | | IDQAACNASQYNQYLSGRQVVNGIATVDL | | |
| | | | MNGQKPHISVETISPSKNWFGAEGRLVYM | | |
| | | | GGRLYIYIRSTGWHSPIQIGVIYTMNPLAIT | | |
| | | | WVTNTVLSRPGSAGCDWNNRCPKACLSG | | |
| | | | VYTDAYPISPDYNHLATMILHSTSTRSNPV | | |
| | | | MVYSSPTNMVNYAQLTTTAQIAGYTTTSC | | |
| | | | FTDNEVGYCATALELTPGTLSSVQPILVMT | | |
| | | | KIPKECV | | |

### ii) Lipid Fusogens

[0487] In some embodiments, the fusosome may be treated with fusogenic lipids, such as saturated fatty acids. In some embodiments, the saturated fatty acids have between 10-14 carbons. In some embodiments, the saturated fatty acids have longer-chain carboxylic acids. In some embodiments, the saturated fatty acids are mono-esters.

[0488] In some embodiments, the fusosome may be treated with unsaturated fatty acids. In some embodiments, the unsaturated fatty acids have between C16 and C18 unsaturated fatty acids. In some embodiments, the unsaturated fatty acids include oleic acid, glycerol mono-oleate, glycerides, diacylglycerol, modified unsaturated fatty acids, and any combination thereof.

[0489] Without wishing to be bound by theory, in some embodiments negative curvature lipids promote membrane fusion. In some embodiments, the fusosome comprises one or more negative curvature lipids, e.g., negative curvature lipids that are exogenous relative to the source cell, in the membrane. In embodiments, the negative curvature lipid or a precursor thereof is added to media comprising source cells or fusosomes. In embodiments, the source cell is engineered to express or overexpress one or more lipid synthesis genes. The negative curvature lipid can be, e.g., diacylglycerol (DAG), cholesterol, phosphatidic acid (PA), phosphatidylethanolamine (PE), or fatty acid (FA).

[0490] Without wishing to be bound by theory, in some embodiments positive curvature lipids inhibit membrane fusion. In some embodiments, the fusosome comprises reduced levels of one or more positive curvature lipids, e.g., exogenous positive curvature lipids, in the membrane. In embodiments, the levels are reduced by inhibiting synthesis of the lipid, e.g., by knockout or knockdown of a lipid synthesis gene, in the source cell. The positive curvature lipid can be, e.g., lysophosphatidylcholine (LPC), phosphatidylinositol (PtdIns), lysophosphatidic acid (LPA), lysophosphatidylethanolamine (LPE), or monoacylglycerol (MAG).

iii) Chemical Fusogens

[0491] In some embodiments, the fusosome may be treated with fusogenic chemicals. In some embodiments, the fusogenic chemical is polyethylene glycol (PEG) or derivatives thereof.

[0492] In some embodiments, the chemical fusogen induces a local dehydration between the two membranes that leads to unfavorable molecular packing of the bilayer. In some embodiments, the chemical fusogen induces dehydration of an area near the lipid bilayer, causing displacement of aqueous molecules between cells and allowing interaction between the two membranes together.

[0493] In some embodiments, the chemical fusogen is a positive cation. Some nonlimiting examples of positive cations include Ca2+, Mg2+, Mn2+, Zn2+, La3+, Sr3+, and H+.

[0494] In some embodiments, the chemical fusogen binds to the target membrane by modifying surface polarity, which alters the hydration-dependent intermembrane repulsion.

[0495] In some embodiments, the chemical fusogen is a soluble lipid soluble. Some nonlimiting examples include oleoylglycerol, dioleoylglycerol, trioleoylglycerol, and variants and derivatives thereof.

[0496] In some embodiments, the chemical fusogen is a water-soluble chemical. Some nonlimiting examples include polyethylene glycol, dimethyl sulphoxide, and variants and derivatives thereof.

[0497] In some embodiments, the chemical fusogen is a small organic molecule. A nonlimiting example includes n-hexyl bromide.

[0498] In some embodiments, the chemical fusogen does not alter the constitution, cell viability, or the ion transport properties of the fusogen or target membrane.

[0499] In some embodiments, the chemical fusogen is a hormone or a vitamin. Some nonlimiting examples include abscisic acid, retinol (vitamin A1), a tocopherol (vitamin E), and variants and derivatives thereof.

[0500] In some embodiments, the fusosome comprises actin and an agent that stabilizes polymerized actin. Without wishing to be bound by theory, stabilized actin in a fusosome can promote fusion with a target cell. In embodiments, the agent that stabilizes polymerized actin is chosen from actin, myosin, biotin-streptavidin, ATP, neuronal Wiskott-Aldrich syndrome protein (N-WASP), or formin. See, e.g., Langmuir. 2011 Aug. 16; 27(16):10061-71 and Wen et al., Nat Commun. 2016 Aug. 31; 7. In embodiments, the fusosome comprises actin that is exogenous or overexpressed relative to the source cell, e.g., wild-type actin or actin comprising a mutation that promotes polymerization. In embodiments, the fusosome comprises ATP or phosphocreatine, e.g., exogenous ATP or phosphocreatine.

### iv) Small Molecule Fusogens

[0501] In some embodiments, the fusosome may be treated with fusogenic small molecules. Some nonlimiting examples include halothane, nonsteroidal anti-inflammatory drugs (NSAIDs) such as meloxicam, piroxicam, tenoxicam, and chlorpromazine.

[0502] In some embodiments, the small molecule fusogen may be present in micelle-like aggregates or free of aggregates.

### v) Fusogen Modifications

[0503] In some embodiments, the fusogen is linked to a cleavable protein. In some cases, a cleavable protein may be cleaved by exposure to a protease. An engineered fusion protein may bind any domain of a transmembrane protein. The engineered fusion protein may be linked by a cleavage peptide to a protein domain located within the intermembrane space. The cleavage peptide may be cleaved by one or a combination of intermembrane proteases (e.g. HTRA2/OMI which requires a non-polar aliphatic amino acid —valine, isoleucine or methionine are preferred—at position P1, and hydrophilic residues —arginine is preferred —at the P2 and P3 positions).

[0504] In some embodiments the fusogen is linked to an affinity tag. In some embodiments the affinity tag aids in fusosome separation and isolation. In some embodiments the affinity tag is cleavable. In some embodiments the affinity tag is non-covalently linked to the fusogen. In some embodiments the affinity tag is present on the fusosome and separate from the fusogen.

[0505] In some embodiments, fusogen proteins are engineered by any methods known in the art or any method described herein to comprise a proteolytic degradation sequence, e.g., a mitochondrial or cytosolic degradation sequence. Fusogen proteins may be engineered to include, but is not limited to a proteolytic degradation sequence, e.g., a Caspase 2 protein sequence (e.g., Val-Asp-Val-Ala-Asp-I- (SEQ ID NO: 209)) or other proteolytic sequences (see, for example, Gasteiger et al., The Proteomics Protocols Handbook; 2005: 571-607), a modified proteolytic degradation sequence that has at least 75%, 80%, 85%, 90%, 95% or greater identity to the wildtype proteolytic degradation sequence, a cytosolic proteolytic degradation sequence, e.g., ubiquitin, or a modified cytosolic proteolytic degradation sequence that has at least 75%, 80%, 85%, 90%, 95% or greater identity to the wildtype proteolytic degradation sequence. In some embodiments, a composition comprises mitochondria in a source cell or chondrisome comprising a protein modified with a proteolytic degradation sequence, e.g., at least 75%, 80%, 85%, 90%, 95% or greater identity to the wildtype proteolytic degradation sequence, a cytosolic proteolytic degradation sequence, e.g., ubiquitin, or a modified cytosolic proteolytic degradation sequence that has at least 75%, 80%, 85%, 90%, 95% or greater identity to the wildtype proteolytic degradation sequence.

[0506] In some embodiments, the fusogen may be modified with a protease domain that recognizes specific proteins, e.g., over-expression of a protease, e.g., an engineered fusion protein with protease activity. For example, a protease or protease domain from a protease, such as MMP, mitochondrial processing peptidase, mitochondrial intermediate peptidase, inner membrane peptidase.

[0507] See, Alfonzo, J.D. & Soll, D. Mitochondrial tRNA import —the challenge to understand has just begun. Biological Chemistry 390: 717-722. 2009; Langer, T. et al. Characterization of Peptides Released from Mitochondria. THE JOURNAL OF BIOLOGICAL CHEMISTRY. Vol. 280, No. 4. 2691-2699, 2005; Vliegh, P. et al. Synthetic therapeutic peptides: science and market. Drug Discovery Today. 15(1/2). 2010; Quiros P. M. m et al., New roles for mitochondrial proteases in health, ageing and disease. Nature Reviews Molecular Cell Biology. V16, 2015; Weber-Lotfi, F. et al. DNA import competence and mitochondrial genetics. Biopolymers and Cell. Vol. 30. N 1. 71-73, 2014.

### III. Positive Target Cell-Specific Regulatory Element

[0508] In some embodiments, a fusosome described herein, e.g. a virus, e.g., a retrovirus, contains a nucleic acid (e.g., the gene encoding the exogenous agent), e.g. a retroviral nucleic acid that comprises a positive target cell-specific regulatory element such as a tissue-specific promoter, a tissue-specific enhancer, a tissue-specific splice site, a tissue-specific site extending half-life of an RNA or protein, a tissue-specific mRNA nuclear export promoting site, a tissue-specific translational enhancing site, or a tissue-specific post-translational modification site.

[0509] In some embodiments, a fusosome, e.g. virus, e.g. retrovirus, described herein contains a nucleic acid, e.g. a retroviral nucleic acid that can comprise regions, e.g., non-translated regions such as origins of replication, selection cassettes, promoters, enhancers, translation initiation signals (Shine Dalgarno sequence or Kozak sequence), introns, a polyadenylation sequence, 5′ and 3′ untranslated regions—which interact with host cellular proteins to carry out transcription and translation, and which are capable of directing, increasing, regulating, or controlling the transcription or expression of an operatively linked polynucleotide. Such elements may vary in their strength and specificity. Depending on the vector system and host utilized, any number of suitable transcription and translation elements, including ubiquitous promoters and inducible promoters may be used.

[0510] In particular embodiments, control elements are capable of directing, increasing, regulating, or controlling the transcription or expression of an operatively linked polynucleotide in a cell-specific manner. In particular embodiments, retroviral nucleic acids comprise one or more expression control sequences that are specific to particular cells, cell types, or cell lineages e.g., target cells; that is, expression of polynucleotides operatively linked to an expression control sequence specific to particular cells, cell types, or cell lineages is expressed in target cells and not (or at a lower level) in non-target cells.

[0511] In particular embodiments, a retroviral nucleic acid can include exogenous, endogenous, or heterologous control sequences such as promoters and/or enhancers.

[0512] In embodiments, the promoter comprises a recognition site to which an RNA polymerase binds. An RNA polymerase initiates and transcribes polynucleotides operably linked to the promoter. In particular embodiments, promoters operative in mammalian cells comprise an AT-rich region located approximately 25 to 30 bases upstream from the site where transcription is initiated and/or another sequence found 70 to 80 bases upstream from the start of transcription, a CNCAAT region where N may be any nucleotide.

[0513] In embodiments, an enhancer comprises a segment of DNA which contains sequences capable of providing enhanced transcription and in some instances can function independent of orientation relative to another control sequence. An enhancer can function cooperatively or additively with promoters and/or other enhancer elements. In some embodiments, a promoter/enhancer segment of DNA contains sequences capable of providing both promoter and enhancer functions.

[0514] Illustrative ubiquitous expression control sequences include, but are not limited to, a cytomegalovirus (CMV) immediate early promoter, a viral simian virus 40 (SV40) (e.g., early or late), a Moloney murine leukemia virus (MoMLV) LTR promoter, a Rous sarcoma virus (RSV) LTR, a herpes simplex virus (HSV) (thymidine kinase) promoter, H5, P7.5, and P11 promoters from vaccinia virus, an elongation factor 1-alpha (EF1a) promoter, early growth response 1 (EGR1), ferritin H (FerH), ferritin L (FerL), Glyceraldehyde 3-phosphate dehydrogenase (GAPDH), eukaryotic translation initiation factor 4A1 (EIF4A1), heat shock 70 kDa protein 5 (HSPAS), heat shock protein 90 kDa beta, member 1 (HSP90B1), heat shock protein 70 kDa (HSP70), β-kinesin (β-KIN), the human ROSA 26 locus Orions et al., Nature Biotechnology 25, 1477-1482 (2007)), a Ubiquitin C promoter (UBC), a phosphoglycerate kinase-1 (PGK) promoter, a cytomegalovirus enhancer/chicken β-actin (CAG) promoter, a β-actin promoter and a myeloproliferative sarcoma virus enhancer, negative control region deleted, d1587rev primer-binding site substituted (MND) promoter (Challita et al., J Virol. 69(2):748-55 (1995)).

[0515] In some embodiments, a promoter may be paired with a heterologous gene to impart the regulatory functions of that promoter on the heterologous gene. In some embodiments, the cis-regulatory elements from a first gene's promoter may be linked to segments of a different gene's promoter to create chimeric promoters that have properties of both promoters.

[0516] In some embodiments, the promoter is a tissue-specific promoter, e.g., a promoter that drives expression in HSCs, e.g., myeloid-lymphoid balanced HSCs, myeloid-biased HSCs, lymphoid-biased HSCs, platelet-biased HSCs, platelet-myeloid-biased HSCs, long-term repopulating HSCs, intermediate-term repopulating HSCs, and short-term repopulating HSCs. Various suitable HSC-specific promoters are described in Table 3 below. Table 3 also lists several ubiquitous promoters which are not specific to HSCs. In some embodiments, a fusosome (e.g., viral vector) described herein comprises, in its nucleic acid, a promoter having a sequence of a promoter in Table 3, or transcriptionally active fragment thereof, or a variant having at least 70%, 75%, 80%, 85%, 90%, 95%, 96%, 97%, 98%, or 99% identity thereto. In some embodiments, a fusosome (e.g., viral vector) described herein comprises, in its nucleic acid, a promoter having transcription factor binding sites from the region within 3 kb of the transcriptional start site for the genes listed in Table 3. In some embodiments, a fusosome (e.g., viral vector) described herein comprises, in its nucleic acid, a region within 2.5 kb, 2 kb, 1.5 kb, 1 kb, or 0.5 kb immediately upstream of the transcriptional start site of a gene listed in Table 3, or a transcriptionally active fragment thereof, or a variant having at least 70%, 75%, 80%, 85%, 90%, 95%, 96%, 97%, 98%, or 99% identity thereto.

[0517] In some embodiments, a fusosome (e.g., viral vector) described herein comprises, in its nucleic acid, has a promoter having a sequence of a promoter set forth in any of SEQ ID NOS: 134, 135, 136, 137, 138 or 139, or transcriptionally active fragment thereof, or a variant having at least 70%, 75%, 80%, 85%, 90%, 95%, 96%, 97%, 98%, or 99% identity thereto. In some embodiments, a fusosome (e.g., viral vector) described herein comprises, in its nucleic acid, has a promoter having a sequence of a promoter set forth in any of SEQ ID NOS: 134, 135, 136, 137, 138 or 139.

TABLE 3
Exemplary promoters, e.g., hematopoietic stem cell-specific promoters

| | | Source of cis- | | SEQ |
|---|---|---|---|---|
| | Promoter | regulatory | | ID |
| Specificity | Name | elements | Exemplary sequence | NO |
| Hematopoietic | vav | Proto-oncogene | | |
| cells | regulatory | vav | | |
| | element, | | | |
| | A2UCOE, | | | |
| | WAS | | | |
| CD34 + HSCs | CD34 | CD34 | | |
| | promoter | | | |
| CD59 + HSCs | CD59 | CD59 | | |
| | promoter | | | |
| CD90 + HSCs | CD90 | CD90 | | |
| | promoter | | | |
| CD49f + HSCs | CD49f | CD49f | | |
| | promoter | | | |
| EMCN + HSCs | EMCN | Endomucin | | |
| | promoter | | | |
| TIE2 + HSCs | TIE2 | TIE2 | | |
| | promoter | | | |
| Erythroid | Beta-globin | Beta-globin | Miccio et al., 2008, Proc. | |
| lineage | promoter | | Natl. Acad. Sci USA, | |
| | | | 105: 10547-52 | |
| Myeloid | CD11b, | | | |
| lineage | LysM, csf1r, | | | |
| | CD11c, | | | |
| | SRA, | | | |
| | C/EBPe, | | | |
| | HNE, | | | |
| | UrMEW | | | |
| B cells | EBF, Igk-E, | | | |
| | B29 | | | |
| B cells | B29 | | | |
| Monocytes | CD14 | | | |
| Macrophages | CD68 | | | |
| Leukocytes + | CD43 | | | |
| Platelets | | | | |
| Leukocytes | CD45 | | | |
| Megakaryocytes | GPIIb | | | |
| ubiquitous | EF1a core | EF1α gene | gggcagagcgcacatcgcccaca | 134 |
| | promoter | | gtccccgagaagttggggggagg | |
| | | | ggtcggcaattgaacgggtgccta | |
| | | | gagaaggtggcgcggggtaaact | |
| | | | gggaaagtgatgtcgtgtactggc | |
| | | | tccgcctttttcccgagggtgggg | |
| | | | gagaaccgtatataagtgcagtag | |
| | | | tcgccgtgaacgttctttttcgcaac | |
| | | | gggtttgccgccagaacacag | |
| ubiquitous | EF1a | EF1α gene | ggctccggtgcccgtcagtgggc | 135 |
| | | | agagcgcacatcgcccacagtcc | |
| | | | ccgagaagttggggggaggggtc | |
| | | | ggcaattgaaccggtgcctagaga | |
| | | | aggtggcgcggggtaaactggga | |
| | | | aagtgatgtcgtgtactggctccgc | |
| | | | ctttttcccgagggtgggggagaa | |
| | | | ccgtatataagtgcagtagtcgcc | |
| | | | gtgaacgttctttttcgcaacgggtt | |
| | | | tgccgccagaacacaggtaagtg | |
| | | | ccgtgtgtggttcccgcgggcctg | |
| | | | gcctctttacgggttatggcccttgc | |
| | | | gtgccttgaattacttccacctggct | |
| | | | ccagtacgtgattcttgatcccgag | |
| | | | ctggagccaggggcgggccttgc | |
| | | | gctttaggagccccttcgcctcgtg | |
| | | | cttgagttgaggcctggcctgggc | |
| | | | gctggggccgccgcgtgcgaatc | |
| | | | tggtggcaccttcgcgcctgtctcg | |
| | | | ctgctttcgataagtctctagccattt | |
| | | | aaaatttttgatgacctgctgcgac | |
| | | | gctttttttctggcaagatagtcttgt | |
| | | | aaatgcgggccaggatctgcaca | |
| | | | ctggtatttcggtttttgggcccgcg | |
| | | | gccggcgacggggcccgtgcgt | |
| | | | cccagcgcacatgttcggcgagg | |
| | | | cggggcctgcgagcgcggccac | |
| | | | cgagaatcggacgggggtagtct | |
| | | | caagctggccggcctgctctggtg | |
| | | | cctggcctcgcgccgccgtgtatc | |
| | | | gccccgccctgggcggcaaggct | |
| | | | ggcccggtcggcaccagttgcgt | |
| | | | gagcggaaagatggccgcttccc | |
| | | | ggccctgctccagggggctcaaa | |
| | | | atggaggacgcggcgctcggga | |
| | | | gagcgggcgggtgagtcacccac | |
| | | | acaaaggaaaagggcctttccgtc | |
| | | | ctcagccgtcgcttcatgtgactcc | |
| | | | acggagtaccgggcgccgtccag | |
| | | | gcacctcgattagttctggagctttt | |
| | | | ggagtacgtcgtctttaggttgggg | |
| | | | ggaggggttttatgcgatggagttt | |
| | | | ccccacactgagtgggtggagact | |
| | | | gaagttaggccagcttggcacttg | |
| | | | atgtaattctccttggaatttggcctt | |
| | | | tttgagtttggatcttggttcattctca | |
| | | | agcctcagacagtggttcaaagttt | |
| | | | ttttcttccatttcaggtgtcgtga | |
| ubiquitous | hPGK | PGK gene | ggggttggggttgcgccttttccaa | 136 |
| | | | ggcagccctgggtttgcgcaggg | |
| | | | acgcggctgctctgggcgtggttc | |
| | | | cgggaaacgcagcggcgccgac | |
| | | | cctgggtctcgcacattcttcacgt | |
| | | | ccgttcgcagcgtcacccggatctt | |
| | | | cgccgctacccttgtgggcccccc | |
| | | | ggcgacgcttcctgctccgcccct | |
| | | | aagtcgggaaggttccttgcggttc | |
| | | | gcggcgtgccggacgtgacaaac | |
| | | | ggaagccgcacgtctcactagtac | |
| | | | cctcgcagacggacagcgccag | |
| | | | ggagcaatggcagcgcgccgac | |
| | | | cgcgatgggctgtggccaatagc | |
| | | | ggctgctcagcggggcgcgccg | |
| | | | agagcagcggccgggaaggggc | |
| | | | ggtgcgggaggcggggtgtggg | |
| | | | gcggtagtgtgggccctgttcctg | |
| | | | cccgcgcggtgttccgcattctgc | |
| | | | aagcctccggagcgcacgtcggc | |
| | | | agtcggctccctcgttgaccgaatc | |
| | | | accgacctctctcccca | |
| ubiquitous | mCMV | Cytomegalo- | ggtaggcgtgtacggtgggaggc | 137 |
| | | virus | ctatataagcagagct | |
| ubiquitous | Ubc | Ubiquitin C | gtctaacaaaaaagccaaaaacg | 138 |
| | | gene | gccagaatttagcggacaatttact | |
| | | | agtctaacactgaaaattacatattg | |
| | | | acccaaatgattacatttcaaaagg | |
| | | | tgcctaaaaaacttcacaaaacac | |
| | | | actcgccaaccccgagcgcatagt | |
| | | | tcaaaaccggagcttcagctactta | |
| | | | agaagataggtacataaaaccgac | |
| | | | caaagaaactgacgcctcacttatc | |
| | | | cctcccctcaccagaggtccggc | |
| | | | gcctgtcgattcaggagagcctac | |
| | | | cctaggcccgaaccctgcgtcctg | |
| | | | cgacggagaaaagcctaccgcac | |
| | | | acctaccggcaggtggccccacc | |
| | | | ctgcattataagccaacagaacgg | |
| | | | gtgacgtcacgacacgacgaggg | |
| | | | cgcgcgctcccaaaggtacgggt | |
| | | | gcactgcccaacggcaccgccat | |
| | | | aactgccgcccccgcaacagacg | |
| | | | acaaaccgagttctccagtcagtg | |
| | | | acaaacttcacgtcagggtcccca | |
| | | | gatggtgccccagcccatctcacc | |
| | | | cgaataagagctttcccgcattagc | |
| | | | gaaggcctcaagaccttgggttctt | |
| | | | gccgcccaccatgccccccacctt | |
| | | | gtttcaacgacctcacagcccgcc | |
| | | | tcacaagcgtcttccattcaagact | |
| | | | cgggaacagccgccattttgctgc | |
| | | | gctccccccaacccccagttcagg | |
| | | | gcaaccttgctcgcggacccaga | |
| | | | ctacagcccttggcggtctctccac | |
| | | | acgcttccgtcccaccgagcggc | |
| | | | ccggcggccacgaaagccccgg | |
| | | | ccagcccagcagcccgctactca | |
| | | | ccaagtgacgatcacagcgatcca | |
| | | | caaacaagaaccgcgacccaaat | |
| | | | cccggctgcgacggaactagctgt | |
| | | | gccacacccggcgcgtccttatat | |
| | | | aatcatcggcgttcaccgccccac | |
| | | | ggagatccctccgcagaatcgcc | |
| | | | gagaagggactacttttcctcgcct | |
| | | | gttccgctctctggaaagaaaacc | |
| | | | agtgccctagagtcacccaagtcc | |
| | | | cgtcctaaaatgtccttctgctgata | |
| | | | ctggggttctaaggccgagtcttat | |
| | | | gagcagcgggccgctgtcctgag | |
| | | | cgtccgggcggaaggatcaggac | |
| | | | gctcgctgcgcccttcgtctgacgt | |
| | | | ggcagcgctcgccgtgaggagg | |
| | | | ggggcgcccgcgggaggcgcca | |
| | | | aaacccggcgcggaggcc | |
| ubiquitous | SFFV | Spleen focus- | gtaacgccattttgcaaggcatgg | 139 |
| | | forming virus | aaaaataccaaaccaagaataga | |
| | | | gaagttcagatcaagggcgggta | |
| | | | catgaaaatagctaacgttgggcc | |
| | | | aaacaggatatctgcggtgagcag | |
| | | | tttcggccccggcccggggccaa | |
| | | | gaacagatggtcaccgcagtttcg | |
| | | | gccccggcccgaggccaagaac | |
| | | | agatggtccccagatatggcccaa | |
| | | | ccctcagcagtttcttaagacccat | |
| | | | cagatgtttccaggctcccccaag | |
| | | | gacctgaaatgaccctgcgccttat | |
| | | | ttgaattaaccaatcagcctgcttct | |
| | | | cgcttctgttcgcgcgcttctgcttc | |
| | | | ccgagctctataaaagagctcaca | |
| | | | acccctcactcggcgcgccagtcc | |
| | | | tccgacagactgagtcgcccggg | |

[0518] An internal ribosome entry site (IRES) typically promotes direct internal ribosome entry to the initiation codon, such as ATG, of a cistron (a protein encoding region), thereby leading to the cap-independent translation of the gene. See, e.g., Jackson et al, (1990) Trends Biochem Sci 15(12):477-83) and Jackson and Kaminski. (1995) RNA 1 (10):985-1000. In particular embodiments, a vector includes one or more exogenous genes encoding one or more exogenous agents. In particular embodiments, to achieve efficient translation of each of the plurality of exogenous protein agents, the polynucleotide sequences can be separated by one or more IRES sequences or polynucleotide sequences encoding self-cleaving polypeptides.

[0519] The retroviral nucleic acids herein can also comprise one or more Kozak sequences, e.g., a short nucleotide sequence that facilitates the initial binding of mRNA to the small subunit of the ribosome and increases translation. The consensus Kozak sequence is (GCC)RCCATGG, where R is a purine (A or G) (Kozak, (1986) Cell. 44(2):283-92, and Kozak, (1987) Nucleic Acids Res. 15(20): 8125-48).

[0520] Promoters Responsive to a Heterologous Transcription Factor and Inducer

[0521] In some embodiments, a retroviral nucleic acid comprises an element allowing for conditional expression of the exogenous agent, e.g., any type of conditional expression including, but not limited to, inducible expression; repressible expression; cell type-specific expression, or tissue-specific expression. In some embodiments, to achieve conditional expression of the exogenous agent, expression is controlled by subjecting a cell, tissue, or organism to a treatment or condition that causes the exogenous agent to be expressed or that causes an increase or decrease in expression of the exogenous agent.

[0522] Illustrative examples of inducible promoters/systems include, but are not limited to, steroid-inducible promoters such as promoters for genes encoding glucocorticoid or estrogen receptors (inducible by treatment with the corresponding hormone), metallothionine promoter (inducible by treatment with various heavy metals), MX-1 promoter (inducible by interferon), the “GeneSwitch” mifepristone-regulatable system (Sirin et al., 2003, Gene, 323:67), the cumate inducible gene switch (WO 2002/088346), tetracycline-dependent regulatory systems, etc.

[0523] Transgene expression may be activated or repressed by the presence or absence of an inducer molecule. In some cases the inducer molecule activates or represses gene expression in a graded manner, and in some cases the inducer molecules activates or represses gene expression in an all-or-nothing manner.

[0524] A commonly used inducible promoter/system is tetracycline (Tet)-regulated system. The Tet system is based on the coexpression of two elements in the respective target cell: (i) the tetracycline response element containing repeats of the Tet-operator sequences (TetO) fused to a minimal promoter and connected to a gene of interest (e.g., a gene encoding the exogenous agent) and (ii) the transcriptional transactivator (tTA), a fusion protein of the Tet-repressor (TetR) and the transactivation domain of the herpes simplex virus derived VP16 protein. Whereas in the originally described version, transgene expression was active in the absence of tetracycline or its potent analogue doxycycline (Do), referred to as Tet-OFF system, modification of four amino acids within the transactivator protein resulted in a reverse tTA (rtTA), which only binds to TetO in the presence of Dox (Tet-ON system). In some embodiments, in the transactivator, the VP16 domain has been replaced by minimal activation domains, potential splice-donor and splice acceptor sites have been removed, and the protein has been codon optimization, resulting in the improved Transactivator variant rtTA2S-M2 with higher sensitivity to Dox and lower baseline activity. Furthermore, different Tet-responsive promoter elements have been generated, including modification in the TetO with 36-nucleotide spacing from neighboring operators to enhance regulation. Additional modifications may be useful to further reduce basal activity and increase the expression dynamic range. As an example, the pTet-T11 (short: TII) variant displays a high dynamic range and low background activity.

[0525] Conditional expression can also be achieved by using a site specific DNA recombinase. According to certain embodiments, the retroviral nucleic acid comprises at least one (typically two) site(s) for recombination mediated by a site specific recombinase, e.g., an excisive or integrative protein, enzyme, cofactor or associated protein that is involved in recombination reactions involving one or more recombination sites (e.g., two, three, four, five, seven, ten, twelve, fifteen, twenty, thirty, fifty, etc.), which may be wild-type proteins (see Landy, Current Opinion in Biotechnology 3:699-707 (1993)), or mutants, derivatives (e.g., fusion proteins containing the recombination protein sequences or fragments thereof), fragments, and variants thereof. Illustrative examples of recombinases include, but are not limited to: Cre, Int, IHF, Xis, Flp, Fis, Hin, Gin, ΦC31, Cin, Tn3 resolvase, TndX, XerC, XerD, TnpX, Hjc, Gin, SpCCE1, and ParA.

[0526] Riboswitches to Regulate Exogenous Agent Expression

[0527] Some of the compositions and methods provided herein include one or more riboswitches or polynucleotides that include one or more riboswitch. Riboswitches are a common feature in bacteria to regulate gene expression and are a means to achieve RNA control of biological functions. Riboswitches can be present in the 5′-untranslated region of mRNAs and can allow for regulatory control over gene expression through binding of a small molecule ligand that induces or suppresses a riboswitch activity. In some embodiments, the riboswitch controls a gene product involved in the generation of the small molecule ligand. Riboswitches typically act in a cis-fashion, although riboswitches have been identified that act in a trans-fashion. Natural riboswitches consist of two domains: an aptamer domain that binds the ligand through a three-dimensional folded RNA structure and a function switching domain that induces or suppresses an activity in the riboswitch based on the absence or presence of the ligand. Thus, there are two ligand sensitive conformations achieved by the riboswitch, representing on and off states (Garst et al., 2011). The function switching domain can affect the expression of a polynucleotide by regulating: an internal ribosome entry site, pre-mRNA splice donor accessibility in the retroviral gene construct, translation, termination of transcription, transcript degradation, miRNA expression, or shRNA expression (Dambach and Winkler 2009). The aptamer and function switching domains can be used as modular components allowing for synthetic RNA devices to control gene expression either as native aptamers, mutated/evolved native aptamers, or totally synthetic aptamers that are identified from screening random RNA libraries (McKeague et al 2016).

[0528] The purine riboswitch family represents one of the largest families with over 500 sequences found (Mandal et al 2003; US20080269258; and WO2006055351). The purine riboswitches share a similar structure consisting of three conserved helical elements/stem structures (PI, P2, P3) with intervening loop/junction elements (J1-2, L2, J2-3, L3, J3-1). The aptamer domains of the purine family of riboswitches naturally vary in their affinity/regulation by various purine compounds such as adenine, guanine, adenosine, guanosine, deoxyadenosine, deoxyguanosine, etc. due to sequence variation (Kim et al. 2007)

[0529] In some embodiments, a retroviral nucleic acid described herein comprises a polynucleotide encoding the exogenous agent operably linked to a promoter and a riboswitch. The riboswitch include one or more of, e.g., all of: a.) an aptamer domain, e.g., an aptamer domain capable of binding a nucleoside analogue antiviral drug and having reduced binding to guanine or 2′-deoxyguanosine relative to the nucleoside analogue antiviral drug; and b.) a function switching domain, e.g., a function switching domain capable of regulating expression of the exogenous agent, wherein binding of the nucleoside analogue by the aptamer domain induces or suppresses the expression regulating activity of the function switching domain, thereby regulating expression of the exogenous agent. In some embodiments, the exogenous agent can be a polypeptide, an miRNA, or an shRNA. For example, in an embodiment, the riboswitch is operably linked to a nucleic acid encoding a chimeric antigen receptor (CAR). In non-limiting illustrative examples provided herein, the exogenous gene encodes one or more engineered signaling polypeptides. For instance, the riboswitch and the target polynucleotide encoding one or more engineered signaling polypeptides can be found in the genome of a source cell, in a replication incompetent recombinant retroviral particle, in a T cell and/or in an NK cell.

[0530] The aptamer domains can be used, e.g., as modular components and combined with any of the function switching domains to affect the RNA transcript. In any of the embodiments disclosed herein, the riboswitch can affect the RNA transcript by regulating any of the following activities: internal ribosomal entry site (IRES), pre-mRNA splice donor accessibility, translation, termination of transcription, transcript degradation, miRNA expression, or shRNA expression. In some embodiments, the function switching domain can control binding of an anti-IRES to an IRES (see, e.g. Ogawa, RNA (2011), 17:478-488, the disclosure of which is incorporated by reference herein in its entirety). In any of the embodiments disclosed herein, the presence or absence of the small molecule ligand can cause the riboswitch to affect the RNA transcript. In some embodiments, the riboswitch can include a ribozyme. Riboswitches with ribozymes can inhibit or enhance transcript degradation of target polynucleotides in the presence of the small molecule ligand. In some embodiments, the ribozyme can be a pistol class of ribozyme, a hammerhead class of ribozyme, a twisted class of ribozyme, a hatchet class of ribozyme, or the HDV (hepatitis delta virus).

### IV. Non-Target Cell-Specific Regulatory Element

[0531] In some embodiments, the non-target cell specific regulatory element or negative TCSRE comprises a tissue-specific miRNA recognition sequence, tissue-specific protease recognition site, tissue-specific ubiquitin ligase site, tissue-specific transcriptional repression site, or tissue-specific epigenetic repression site.

[0532] In some embodiments, a non-target cell comprises an endogenous miRNA. The retroviral nucleic acid (e.g., the gene encoding the exogenous agent) may comprise a recognition sequence for that miRNA. Thus, if the retroviral nucleic acid enters the non-target cell, the miRNA can downregulate expression of the exogenous agent. This helps achieve additional specificity for the target cell versus non-target cells.

[0533] In some embodiments, the miRNA is a small non-coding RNAs of 20-22 nucleotides, typically excised from 70 nucleotide foldback RNA precursor structures known as pre-miRNAs. In general, miRNAs negatively regulate their targets in one of two ways depending on the degree of complementarity between the miRNA and the target. First, miRNAs that bind with perfect or nearly perfect complementarity to protein-coding mRNA sequences typically induce the RNA-mediated interference (RNAi) pathway. miRNAs that exert their regulatory effects by binding to imperfect complementary sites within the 3′ untranslated regions (UTRs) of their mRNA targets, typically repress target-gene expression post-transcriptionally, apparently at the level of translation, through a RISC complex that is similar to, or possibly identical with, the one that is used for the RNAi pathway. Consistent with translational control, miRNAs that use this mechanism reduce the protein levels of their target genes, but the mRNA levels of these genes are only minimally affected. miRNAs (e.g., naturally occurring miRNAs or artificially designed miRNAs) can specifically target any mRNA sequence. For example, in one embodiment, the skilled artisan can design short hairpin RNA constructs expressed as human miRNA (e.g., miR-30 or miR-21) primary transcripts. This design adds a Drosha processing site to the hairpin construct and has been shown to greatly increase knockdown efficiency (Pusch et al., 2004). The hairpin stem consists of 22-nt of dsRNA (e.g., antisense has perfect complementarity to desired target) and a 15-19-nt loop from a human miR. Adding the miR loop and miR30 flanking sequences on either or both sides of the hairpin results in greater than 10-fold increase in Drosha and Dicer processing of the expressed hairpins when compared with conventional shRNA designs without microRNA. Increased Drosha and Dicer processing translates into greater siRNA/miRNA production and greater potency for expressed hairpins.

[0534] Hundreds of distinct miRNA genes are differentially expressed during development and across tissue types. Several studies have suggested important regulatory roles for miRNAs in a broad range of biological processes including developmental timing, cellular differentiation, proliferation, apoptosis, oncogenesis, insulin secretion, and cholesterol biosynthesis. (See Bartel 2004 Cell 116:281-97; Ambros 2004 Nature 431:350-55; Du et al. 2005 Development 132:4645-52; Chen 2005 N. Engl. J. Med. 353:1768-71; Krutzfeldt et al. 2005 Nature 438:685-89.) Molecular analysis has shown that miRNAs have distinct expression profiles in different tissues. Computational methods have been used to analyze the expression of approximately 7,000 predicted human miRNA targets. The data suggest that miRNA expression broadly contributes to tissue specificity of mRNA expression in many human tissues. (See Sood et al. 2006 PNAS USA 103(8):2746-51.)

[0535] Thus, an miRNA-based approach may be used for restricting expression of the exogenous agent to a target cell population by silencing exogenous agent expression in non-target cell types by using endogenous microRNA species. MicroRNA induces sequence-specific post-transcriptional gene silencing in many organisms, either by inhibiting translation of messenger RNA (mRNA) or by causing degradation of the mRNA. See, e.g., Brown et al. 2006 Nature Med. 12(5):585-91, and WO2007/000668, each of which is herein incorporated by reference in its entirety. In some embodiments, the retroviral nucleic acid comprises one or more of (e.g., a plurality of) tissue-specific miRNA recognition sequences. In some embodiments, the tissue-specific miRNA recognition sequence is about 20-25, 21-24, or 23 nucleotides in length. In embodiments, the tissue-specific miRNA recognition sequence has perfect complementarity to an miRNA present in a non-target cell. In some embodiments, the exogenous agent does not comprise GFP, e.g., does not comprise a fluorescent protein, e.g., does not comprise a reporter protein. In some embodiments, the off-target cells are not hematopoietic cell and/or the miRNA is not present in hematopoietic cells.

[0536] In some embodiments, a method herein comprises tissue-specific expression of an exogenous agent in a target cell comprising contacting a plurality of retroviral vectors comprising a nucleotide encoding the exogenous agent and at least one tissue-specific microRNA (miRNA) target sequence with a plurality of cells comprising target cells and non-target cells, wherein the exogenous agent is preferentially expressed in, e.g., restricted, to the target cell.

[0537] For example, the retroviral nucleic acid can comprise at least one miRNA recognition sequence operably linked to a nucleotide sequence having a corresponding miRNA in a non-target cell. In some embodiments, the retroviral nucleic acid comprises at least one miRNA sequence target for a miRNA which is present in an effective amount (e.g., concentration of the endogenous miRNA is sufficient to reduce or prevent expression of a transgene) in the non-target cell, and comprises a transgene. In embodiments, the miRNA used in this system is strongly expressed in non-target cells, but not in target cells, preventing or reducing expression of a transgene in non-target cells, while maintaining expression and therapeutic efficacy in the target cells.

[0538] In some embodiments, the negative TSCRE or NTSCRE comprises an miRNA recognition site. Exemplary miRNAs are provided in Table 4 below. In some embodiments, the nucleic acid (e.g., fusosome nucleic acid or retroviral nucleic acid) comprises a sequence that is complementary to a miRNA of Table 4, or has at least 50%, 60%, 70%, 75%, 80%, 85%, 90%, 95%, 96%, 97%, 98%, or 99% complementarity thereto. In some embodiments, the nucleic acid (e.g., fusosome nucleic acid or retroviral nucleic acid) comprises a sequence that is perfectly complementary to a seed sequence within an endogenous miRNA, e.g., miRNA of Table 4. In embodiments, the seed sequence is at least 6, 7, 8, 9, or 10 nucleotides in length.

[0539] In some embodiments, the nucleic acid (e.g., fusosome nucleic acid or retroviral nucleic acid) comprises a sequence that is complementary to a miRNA set forth in any of SEQ ID NOS: 140-150, or has at least 50%, 60%, 70%, 75%, 80%, 85%, 90%, 95%, 96%, 97%, 98%, or 99% complementarity thereto. In some embodiments, the nucleic acid (e.g., fusosome nucleic acid or retroviral nucleic acid) comprises a sequence that is perfectly complementary to a seed sequence within an endogenous miRNA, e.g., miRNA set forth in any of SEQ ID NOS: 140-150. In embodiments, the seed sequence is at least 6, 7, 8, 9, or 10 nucleotides in length.

TABLE 4
Exemplary miRNA sequences.

| | | | | SEQ |
|---|---|---|---|---|
| Silenced cell type | miRNA name | Mature miRNA | miRNA sequence | ID NO |
| pDCs | miR-126 | hsa-miR-126-5p | cauuauuacuuuugguacgcg | 140 |
| pDCs | miR-126 | hsa-miR-126-3p | ucguaccgugaguaauaaugcg | 141 |
| Myeloid | miR-223 | hsa-miR-223-5p | cguguauuugacaagcugaguu | 142 |
| Myeloid | miR-223 | hsa-miR-223-3p | ugucaguuugucaaauacccca | 143 |
| T cell progenitors | miR-181a | hsa-miR-181a-5p | aacauucaacgcugucggugagu | 144 |
| T cell progenitors | miR-181a | hsa-miR-181a-3p | accaucgaccguugauuguacc | 145 |
| T cell progenitors | miR-181a-2 | hsa-miR-181a-2-3p | accacugaccguugacuguacc | 146 |
| Activated T cells/DCs | miR-155 | hsa-miR-155-5p | uuaaugcuaaucgugauagggguu | 147 |
| Activated T cells/DCs | miR-155 | hsa-miR-155-3p | cuccuacauauuagcauuaaca | 148 |
| Mature lymphocytes | miR-150 | hsa-miR-150-5p | ucucccaacccuuguaccagug | 149 |
| Mature lymphocytes | miR-150 | hsa-miR-150-3p | cugguacaggccugggggacag | 150 |

[0540] In some embodiments, the negative TSCRE or NTSCRE comprises an miRNA recognition site for an miRNA described herein. Exemplary miRNAs include those found in Griffiths-Jones et al. Nucleic Acids Res. 2006 Jan. 1, 34; Chen and Lodish, Semin Immunol. 2005 April; 17(2):155-65; Chen et al. Science. 2004 Jan. 2; 303(5654):83-6; Barad et al. Genome Res. 2004 December; 14(12): 2486-2494; Krichevsky et al., RNA. 2003 October; 9(10):1274-81; Kasashima et al. Biochem Biophys Res Commun. 2004 Sep. 17; 322(2):403-10; Houbaviy et al., Dev Cell. 2003 August; 5(2):351-8; Lagos-Quintana et al., Curr Biol. 2002 Apr. 30; 12(9):735-9; Calin et al., Proc Natl Acad Sci USA. 2004 Mar. 2; 101(9):2999-3004; Sempere et al. Genome Biol. 2004; 5(3): R13; Metzler et al., Genes Chromosomes Cancer. 2004 February; 39(2):167-9; Calin et al., Proc Natl Acad Sci USA. 2002 Nov. 26; 99(24):15524-9; Mansfield et al. Nat Genet. 2004 October; 36(10):1079-83; Michael et al. Mol Cancer Res. 2003 October; 1(12):882-91; and at www.miRNA.org.

[0541] In some embodiments, the negative TSCRE or NTSCRE comprises an miRNA recognition site for an miRNA selected from miR-1b, miR-189b, miR-93, miR-125b, miR-130, miR-32, miR-128, miR-22, miR124a, miR-296, miR-143, miR-15, miR-141, miR-143, miR-16, miR-127, miR99a, miR-183, miR-19b, miR-92, miR-9, miR-130b, miR-21, miR-30b, miR-16, miR-99a, miR-212, miR-30c, miR-213, miR-20, miR-155, miR-152, miR-139, miR-30b, miR-7, miR-30c, miR-18, miR-137, miR-219, miR-1d, miR-178, miR-24, miR-122a, miR-215, miR-124a, miR-190, miR-149, miR-193, let-7a, miR-132, miR-27a, miR-9*, miR-200b, miR-266, miR-153, miR-135, miR-206, miR-24, miR-19a, miR-199, miR-26a, miR-194, miR-125a, miR-15a, miR-145, miR-133, miR-96, miR-131, miR-124b, miR-151, miR-7b, miR-103, and miR-208.

[0542] In some embodiments, the nucleic acid (e.g., retroviral nucleic acid) comprises two or more miRNA recognition sites. In some embodiments, the first miRNA recognition site and second miRNA recognition site are recognized by the same miRNA, and in some embodiments, the first miRNA recognition site and second miRNA recognition site are recognized by different miRNAs. In some embodiments, the first miRNA recognition site and second miRNA recognition site are recognized by miRNAs present in the same non-target cell, and in some embodiments, the first miRNA recognition site and second miRNA recognition site are recognized by miRNAs present in different non-target cells. In some embodiments, one or both of the first miRNA recognition site and second miRNA recognition site are recognized by miRNAs of Table 4. In some embodiments, one or more of the miRNA recognition sites on the fusosome nucleic acid (e.g. retroviral nucleic acid) are transcribed in cis with the exogenous agent. In some embodiments, one or more of the miRNA recognition sites on the fusosome nucleic acid (e.g., retroviral nucleic acid) are situated downstream of the poly A tail sequence, e.g., between the poly A tail sequence and the WPRE. In some embodiments, one or more of the miRNA recognition sites on the fusosome nucleic acid (e.g., retroviral nucleic acid) are situated downstream of the WPRE.

### V. Immune Modulation

[0543] In some embodiments, a fusosome, e.g. retroviral vector or VLP described herein comprises elevated CD47. See, e.g., U.S. Pat. No. 9,050,269, which is herein incorporated by reference in its entirety. In some embodiments, a fusosome, e.g. retroviral vector or VLP described herein comprises elevated Complement Regulatory protein. See, e.g., ES2627445T3 and U.S. Pat. No. 6,790,641, each of which is incorporated herein by reference in its entirety. In some embodiments, a fusosome, e.g. retroviral vector or VLP described herein lacks or comprises reduced levels of an MHC protein, e.g., an MHC-1 class 1 or class II. See, e.g., US20170165348, which is herein incorporated by reference in its entirety.

[0544] Sometimes fusosome, e.g. retroviral vectors or VLPs are recognized by the subject's immune system. In the case of enveloped viral vector particles (e.g., retroviral vector particles), membrane-bound proteins that are displayed on the surface of the viral envelope may be recognized and the viral particle itself may be neutralised. Furthermore, on infecting a target cell, the viral envelope becomes integrated with the cell membrane and as a result viral envelope proteins may become displayed on or remain in close association with the surface of the cell. The immune system may therefore also target the cells which the viral vector particles have infected. Both effects may lead to a reduction in the efficacy of exogenous agent delivery by viral vectors.

[0545] A viral particle envelope typically originates in a membrane of the source cell. Therefore, membrane proteins that are expressed on the cell membrane from which the viral particle buds may be incorporated into the viral envelope.

[0546] The Immune Modulating Protein CD47

[0547] The internalization of extracellular material into cells is commonly performed by a process called endocytosis (Rabinovitch, 1995, Trends Cell Biol. 5(3):85-7; Silverstein, 1995, Trends Cell Biol. 5(3):141-2; Swanson et al., 1995, Trends Cell Biol. 5(3):89-93; Allen et al., 1996, J. Exp. Med. 184(2):627-37). Endocytosis may fall into two general categories: phagocytosis, which involves the uptake of particles, and pinocytosis, which involves the uptake of fluid and solutes.

[0548] Professional phagocytes have been shown to differentiate from non-self and self, based on studies with knockout mice lacking the membrane receptor CD47 (Oldenborg et al., 2000, Science 288(5473):2051-4). CD47 is a ubiquitous member of the Ig superfamily that interacts with the immune inhibitory receptor SIRPα (signal regulatory protein) found on macrophages (Fujioka et al., 1996, Mol. Cell. Biol. 16(12):6887-99; Veillette et al., 1998, J. Biol. Chem. 273(35):22719-28; Jiang et al., 1999, J. Biol. Chem. 274(2):559-62). Although CD47-SIRPa interactions appear to deactivate autologous macrophages in mouse, severe reductions of CD47 (perhaps 90%) are found on human blood cells from some Rh genotypes that show little to no evidence of anemia (Mouro-Chanteloup et al., 2003, Blood 101(1):338-344) and also little to no evidence of enhanced cell interactions with phagocytic monocytes (Arndt et al., 2004, Br. J. Haematol. 125(3):412-4).

[0549] In some embodiments, a retroviral vector or VLP (e.g., a viral particle having a radius of less than about 1 μm, 400 nm, or 150 nm), comprises at least a biologically active portion of CD47, e.g., on an exposed surface of the retroviral vector or VLP. In some embodiments, the retroviral vector (e.g., lentivirus) or VLP includes a lipid coat. In embodiments, the amount of the biologically active CD47 in the retroviral vector or VLP is between about 20-250, 20-50, 50-100, 100-150, 150-200, or 200-250 molecules/μm². In some embodiments, the CD47 is human CD47.

[0550] A method described herein can comprise evading phagocytosis of a particle by a phagocytic cell. The method may include expressing at least one peptide including at least a biologically active portion of CD47 in a retroviral vector or VLP so that, when the retroviral vector or VLP comprising the CD47 is exposed to a phagocytic cell, the viral particle evades phacocytosis by the phagocytic cell, or shows decreased phagocytosis compared to an otherwise similar unmodified retroviral vector or VLP. In some embodiments, the half-life of the retroviral vector or VLP in a subject is extended compared to an otherwise similar unmodified retroviral vector or VLP.

[0551] MHC Deletion

[0552] The major histocompatibility complex class I (MHC-I) is a host cell membrane protein that can be incorporated into viral envelopes and, because it is highly polymorphic in nature, it is a major target of the body's immune response (McDevitt H. O. (2000) Annu. Rev. Immunol. 18: 1-17). MHC-I molecules exposed on the plasma membrane of source cells can be incorporated in the viral particle envelope during the process of vector budding. These MHC-I molecules derived from the source cells and incorporated in the viral particles can in turn be transferred to the plasma membrane of target cells. Alternatively, the MHC-I molecules may remain in close association with the target cell membrane as a result of the tendency of viral particles to absorb and remain bound to the target cell membrane.

[0553] The presence of exogenous MHC-I molecules on or close to the plasma membrane of transduced cells may elicit an alloreactive immune response in subjects. This may lead to immune-mediated killing or phagocytosis of transduced cells either upon ex vivo gene transfer followed by administration of the transduced cells to the subject, or upon direct in vivo administration of the viral particles. Furthermore, in the case of in vivo administration of MHC-I bearing viral particles into the bloodstream, the viral particles may be neutralised by pre-existing MHC-I specific antibodies before reaching their target cells.

[0554] Accordingly, in some embodiments, a source cell is modified (e.g., genetically engineered) to decrease expression of MHC-I on the surface of the cell. In embodiments, the source comprises a genetically engineered disruption of a gene encoding β2-microglobulin (β2M). In embodiments, the source cell comprises a genetically engineered disruption of one or more genes encoding an MHC-I a chain. The cell may comprise genetically engineered disruptions in all copies of the gene encoding β2-microglobulin. The cell may comprise genetically engineered disruptions in all copies of the genes encoding an MHC-I a chain. The cell may comprise both genetically engineered disruptions of genes encoding β2-microglobulin and genetically engineered disruptions of genes encoding an MHC-I a chain. In some embodiments, the retroviral vector or VLP comprises a decreased number of surface-exposed MHC-I molecules. The number of surface-exposed MHC-I molecules may be decreased such that the immune response to the MHC-I is decreased to a therapeutically relevant degree. In some embodiments, the enveloped viral vector particle is substantially devoid of surface-exposed MHC-I molecules.

[0555] HLA-G/E Overexpression

[0556] In some embodiments, a retroviral vector or VLP displays on its envelope a tolerogenic protein, e.g., an ILT-2 or ILT-4 agonist, e.g., HLA-E or HLA-G or any other ILT-2 or ILT-4 agonist. In some embodiments, a retroviral vector or VLP has increased expression of HLA-E, HLA-G, ILT-2 or ILT-4 compared to a reference retrovirus, e.g., an unmodified retrovirus otherwise similar to the retrovirus.

[0557] In some embodiments, a retrovirus composition has decreased MHC Class I compared to an unmodified retrovirus and increased HLA-G compared to an unmodified retrovirus.

[0558] In some embodiments, the retroviral vector or VLP has an increase in expression of HLA-G or HLA-E, e.g., an increase in expression of 1%, 5%, 10%, 20%, 30%, 40%, 50%, 60%, 70%, 80%, 90%, or more of HLA-G or HLA-E, compared to a reference retrovirus, e.g., an unmodified retrovirus otherwise similar to the retrovirus, wherein expression of HLA-G or HLA-E is assayed in vitro using flow cytometry, e.g., FACS.

[0559] In some embodiments, the retrovirus with increased HLA-G expression demonstrates reduced immunogenicity, e.g., as measured by reduced immune cell infiltration, in a teratoma formation assay.

[0560] Complement Regulatory Proteins

[0561] Complement activity is normally controlled by a number of complement regulatory proteins (CRPs). These proteins prevent spurious inflammation and host tissue damage. One group of proteins, including CD55/decay accelerating factor (DAF) and CD46/membrane cofactor protein (MCP), inhibits the classical and alternative pathway C3/C5 convertase enzymes. Another set of proteins including CD59 regulates MAC assembly. CRPs have been used to prevent rejection of xenotransplanted tissues and have also been shown to protect viruses and viral vectors from complement inactivation.

[0562] Membrane resident complement control factors include, e.g., decay-accelerating factor (DAF) or CD55, factor H (FH)-like protein-1 (FHL-1), C4b-binding protein (C4BP), Complement receptor 1 (CD35), membrane cofactor protein (MCP) or CD46, and CD59 (protectin) (e.g., to prevent the formation of membrane attack complex (MAC) and protect cells from lysis).

[0563] Albumin Binding Protein

[0564] In some embodiments the lentivirus binds albumin. In some embodiments the lentivirus comprises on its surface a protein that binds albumin. In some embodiments the lentivirus comprises on its surface an albumin binding protein. In some embodiments the albumin binding protein is streptococcal Albumin Binding protein. In some embodiments the albumin binding protein is streptococcal Albumin Binding Domain.

[0565] Expression of Non-Fusogen Proteins on the Lentiviral Envelope

In some embodiments the lentivirus is engineered to comprise one or more proteins on its surface. In some embodiments the proteins affect immune interactions with a subject. In some embodiments the proteins affect the pharmacology of the lentivirus in the subject. In some embodiments the protein is a receptor. In some embodiments the protein is an agonist. In some embodiments the protein is a signaling molecule. In some embodiments, the protein on the lentiviral surface comprises OKT3 or IL7.

[0566] In some embodiments, comprises a mitogenic transmembrane protein and/or a cytokine-based transmembrane protein is present in the source cell, which can be incorporated into the retrovirus when it buds from the source cell membrane. The mitogenic transmembrane protein and/or a cytokine-based transmembrane protein can be expressed as a separate cell surface molecule on the source cell rather than being part of the viral envelope glycoprotein.

[0567] Exemplary Features

[0568] In some embodiments of any of the aspects described herein, the retroviral vector, VLP, or pharmaceutical composition is substantially non-immunogenic. Immunogenicity can be quantified, e.g., as described herein.

[0569] In some embodiments, a retroviral vector or VLP fuses with a target cell to produce a recipient cell. In some embodiments, a recipient cell that has fused to one or more retroviral vectors or VLPs is assessed for immunogenicity. In embodiments, a recipient cell is analyzed for the presence of antibodies on the cell surface, e.g., by staining with an anti-IgM antibody. In other embodiments, immunogenicity is assessed by a PBMC cell lysis assay. In embodiments, a recipient cell is incubated with peripheral blood mononuclear cells (PBMCs) and then assessed for lysis of the cells by the PBMCs. In other embodiments, immunogenicity is assessed by a natural killer (NK) cell lysis assay. In embodiments, a recipient cell is incubated with NK cells and then assessed for lysis of the cells by the NK cells. In other embodiments, immunogenicity is assessed by a CD8+ T-cell lysis assay. In embodiments, a recipient cell is incubated with CD8+ T-cells and then assessed for lysis of the cells by the CD8+ T-cells.

[0570] In some embodiments, the retroviral vector or VLP comprises elevated levels of an immunosuppressive agent (e.g., immunosuppressive protein) as compared to a reference retroviral vector or VLP, e.g., one produced from an unmodified source cell otherwise similar to the source cell, or a HEK293 cell. In some embodiments, the elevated level is at least 5%, 10%, 20%, 30%, 40%, 50%, 60%, 70%, 80%, 90%, 2-fold, 3-fold, 5-fold, 10-fold, 20-fold, 50-fold, or 100-fold. In some embodiments, the retroviral vector or VLP comprises an immunosuppressive agent that is absent from the reference cell. In some embodiments, the retroviral vector or VLP comprises reduced levels of an immunostimulatory agent (e.g., immunostimulatory protein) as compared to a reference retroviral vector or VLP, e.g., one produced from an unmodified source cell otherwise similar to the source cell, or a HEK293 cell. In some embodiments, the reduced level is at least 5%, 10%, 20%, 30%, 40%, 50%, 60%, 70%, 80%, 90%, 95%, 98%, or 99% compared to the reference retroviral vector or VLP. In some embodiments, the immunostimulatory agent is substantially absent from the retroviral vector or VLP.

[0571] In some embodiments, the retroviral vector or VLP, or the source cell from which the retroviral vector or VLP is derived, has one, two, three, four, five, six, seven, eight, nine, ten, eleven, twelve, or more of the following characteristics:
[0572] a. less than 50%, 40%, 30%, 20%, 15%, 10%, or 5% or lesser expression of MHC class I or MHC class II, compared to a reference retroviral vector or VLP, e.g., an unmodified retroviral vector or VLP from a source cell otherwise similar to the source cell, or a HeLa cell, or a HEK293 cell;
[0573] b. less than 50%, 40%, 30%, 20%, 15%, 10%, or 5% or lesser expression of one or more co-stimulatory proteins including but not limited to: LAGS, ICOS-L, ICOS, Ox40L, OX40, CD28, B7, CD30, CD30L 4-1BB, 4-1BBL, SLAM, CD27, CD70, HVEM, LIGHT, B7-H3, or B7-H4, compared to a reference retroviral vector or VLP, e.g., an unmodified retroviral vector or VLP from a cell otherwise similar to the source cell, or a HEK cell, or a reference cell described herein;
[0574] c. expression of surface proteins which suppress macrophage engulfment e.g., CD47, e.g., detectable expression by a method described herein, e.g., more than 1.5-fold, 2-fold, 3-fold, 4-fold, 5-fold, 10-fold, or more expression of the surface protein which suppresses macrophage engulfment, e.g., CD47, compared to a reference retroviral vector or VLP, e.g., an unmodified retroviral vector or VLP from a cell otherwise similar to the source cell, a Jurkat cell, or a HEK293 cell;
[0575] d. expression of soluble immunosuppressive cytokines, e.g., IL-10, e.g., detectable expression by a method described herein, e.g., more than 1.5-fold, 2-fold, 3-fold, 4-fold, 5-fold, 10-fold, or more expression of soluble immunosuppressive cytokines, e.g., IL-10, compared to a reference retroviral vector or VLP, e.g., an unmodified retroviral vector or VLP from a cell otherwise similar to the source cell, or a HEK293 cell;
[0576] e. expression of soluble immunosuppressive proteins, e.g., PD-L1, e.g., detectable expression by a method described herein, e.g., more than 1.5-fold, 2-fold, 3-fold, 4-fold, 5-fold, 10-fold, or more expression of soluble immunosuppressive proteins, e.g., PD-L1, compared to a reference retroviral vector or VLP, e.g., an unmodified retroviral vector or VLP from a cell otherwise similar to the source cell, or a HEK293 cell;
[0577] f. less than 50%, 40%, 30%, 20%, 15%, 10%, or 5% or lesser expression of soluble immune stimulating cytokines, e.g., IFN-gamma or TNF-α, compared to a reference retroviral vector or VLP, e.g., an unmodified retroviral vector or VLP from a cell otherwise similar to the source cell, or a HEK293 cell or a U-266 cell;
[0578] g. less than 50%, 40%, 30%, 20%, 15%, 10%, or 5% or lesser expression of endogenous immune-stimulatory antigen, e.g., Zg16 or Hormad1, compared to a reference retroviral vector or VLP, e.g., an unmodified retroviral vector or VLP from a cell otherwise similar to the source cell, or a HEK293 cell or an A549 cell, or a SK-BR-3 cell;
[0579] h. expression of, e.g., detectable expression by a method described herein, HLA-E or HLA-G, compared to a reference retroviral vector or VLP, e.g., an unmodified retroviral vector or VLP from a cell otherwise similar to the source cell, a HEK293 cell, or a or a Jurkat cell;
[0580] i. surface glycosylation profile, e.g., containing sialic acid, which acts to, e.g., suppress NK cell activation;
[0581] j. less than 50%, 40%, 30%, 20%, 15%, 10%, or 5% or lesser expression of TCRα/β, compared to a reference retroviral vector or VLP, e.g., an unmodified retroviral vector or VLP from a cell otherwise similar to the source cell, a HEK293 cell, or a Jurkat cell;
[0582] k. less than 50%, 40%, 30%, 20%, 15%, 10%, or 5% or lesser expression of ABO blood groups, compared to a reference retroviral vector or VLP, e.g., an unmodified retroviral vector or VLP from a cell otherwise similar to the source cell, a HEK293 cell, or a HeLa cell;
[0583] l. less than 50%, 40%, 30%, 20%, 15%, 10%, or 5% or lesser expression of Minor Histocompatibility Antigen (MHA), compared to a reference retroviral vector or VLP, e.g., an unmodified retroviral vector or VLP from a cell otherwise similar to the source cell, a HEK293 cell, or a Jurkat cell; or
[0584] m. has less than 10%, 9%, 8%, 7%, 6%, 5%, 4%, 3%, 2%, 1%, or less, of mitochondrial MHAs, compared to a reference retroviral vector or VLP e.g., an unmodified retroviral vector or VLP from a cell otherwise similar to the source cell, a HEK293 cell, or a Jurkat cell, or has no detectable mitochondrial MHAs.

[0585] In embodiments, the co-stimulatory protein is 4-1BB, B7, SLAM, LAG3, HVEM, or LIGHT, and the reference cell is HDLM-2. In some embodiments, the co-stimulatory protein is BY-H3 and the reference cell is HeLa. In some embodiments, the co-stimulatory protein is ICOSL or B7-H4, and the reference cell is SK-BR-3. In some embodiments, the co-stimulatory protein is ICOS or OX40, and the reference cell is MOLT-4. In some embodiments, the co-stimulatory protein is CD28, and the reference cell is U-266. In some embodiments, the co-stimulatory protein is CD30L or CD27, and the reference cell is Daudi.

[0586] In some embodiments, the retroviral vector, VLP, or pharmaceutical composition does not substantially elicit an immunogenic response by the immune system, e.g., innate immune system. In embodiments, an immunogenic response can be quantified, e.g., as described herein. In some embodiments, an immunogenic response by the innate immune system comprises a response by innate immune cells including, but not limited to NK cells, macrophages, neutrophils, basophils, eosinophils, dendritic cells, mast cells, or gamma/delta T cells. In some embodiments, an immunogenic response by the innate immune system comprises a response by the complement system which includes soluble blood components and membrane bound components.

[0587] In some embodiments, the retroviral vector, VLP, or pharmaceutical composition does not substantially elicit an immunogenic response by the immune system, e.g., adaptive immune system. In some embodiments, an immunogenic response by the adaptive immune system comprises an immunogenic response by an adaptive immune cell including, but not limited to a change, e.g., increase, in number or activity of T lymphocytes (e.g., CD4 T cells, CD8 T cells, and or gamma-delta T cells), or B lymphocytes. In some embodiments, an immunogenic response by the adaptive immune system includes increased levels of soluble blood components including, but not limited to a change, e.g., increase, in number or activity of cytokines or antibodies (e.g., IgG, IgM, IgE, IgA, or IgD).

[0588] In some embodiments, the retroviral vector, VLP, or pharmaceutical composition is modified to have reduced immunogenicity. In some embodiments, the retroviral vector, VLP, or pharmaceutical composition has an immunogenicity less than 5%, 10%, 20%, 30%, 40%, or 50% lesser than the immunogenicity of a reference retroviral vector or VLP, e.g., an unmodified retroviral vector or VLP from a cell otherwise similar to the source cell, a HEK293 cell, or a Jurkat cell.

[0589] In some embodiments of any of the aspects described herein, the retroviral vector, VLP, or pharmaceutical composition is derived from a source cell, e.g., a mammalian cell, having a modified genome, e.g., modified using a method described herein, to reduce, e.g., lessen, immunogenicity. Immunogenicity can be quantified, e.g., as described herein.

[0590] In some embodiments, the retroviral vector, VLP, or pharmaceutical composition is derived from a mammalian cell depleted of, e.g., with a knock out of, one, two, three, four, five, six, seven or more of the following:
[0591] a. MHC class I, MHC class II or MHA;
[0592] b. one or more co-stimulatory proteins including but not limited to: LAG3, ICOS-L, ICOS, Ox40L, OX40, CD28, B7, CD30, CD30L 4-1BB, 4-1BBL, SLAM, CD27, CD70, HVEM, LIGHT, B7-H3, or B7-H4;
[0593] c. soluble immune-stimulating cytokines e.g., IFN-gamma or TNF-α;
[0594] d. endogenous immune-stimulatory antigen, e.g., Zg16 or Hormad1;
[0595] e. T-cell receptors (TCR);
[0596] f. The genes encoding ABO blood groups, e.g., ABO gene;
[0597] g. transcription factors which drive immune activation, e.g., NFkB;
[0598] h. transcription factors that control MHC expression e.g., class II trans-activator (CIITA), regulatory factor of the Xbox 5 (RFX5), RFX-associated protein (RFXAP), or RFX ankyrin repeats (RFXANK; also known as RFXB); or
[0599] i. TAP proteins, e.g., TAP2, TAP1, or TAPBP, which reduce MHC class I expression.

[0600] In some embodiments, the retroviral vector or VLP is derived from a source cell with a genetic modification which results in increased expression of an immunosuppressive agent, e.g., one, two, three or more of the following (e.g., wherein before the genetic modification the cell did not express the factor):
[0601] a. surface proteins which suppress macrophage engulfment, e.g., CD47; e.g., increased expression of CD47 compared to a reference retroviral vector or VLP, e.g., an unmodified retroviral vector or VLP from a cell otherwise similar to the source cell, a HEK293 cell, or a Jurkat cell;
[0602] b. soluble immunosuppressive cytokines, e.g., IL-10, e.g., increased expression of IL-10 compared to a reference retroviral vector or VLP, e.g., an unmodified retroviral vector or VLP from a cell otherwise similar to the source cell, a HEK293 cell, or a Jurkat cell;
[0603] c. soluble immunosuppressive proteins, e.g., PD-1, PD-L1, CTLA4, or BTLA; e.g., increased expression of immunosuppressive proteins compared to a reference retroviral vector or VLP, e.g., an unmodified retroviral vector or VLP from a cell otherwise similar to the cell source, a HEK293 cell, or a Jurkat cell;
[0604] d. a tolerogenic protein, e.g., an ILT-2 or ILT-4 agonist, e.g., HLA-E or HLA-G or any other endogenous ILT-2 or ILT-4 agonist, e.g., increased expression of HLA-E, HLA-G, ILT-2 or ILT-4 compared to a reference retroviral vector or VLP, e.g., an unmodified retroviral vector or VLP from a cell otherwise similar to the source cell, a HEK293 cell, or a Jurkat cell; or
[0605] e. surface proteins which suppress complement activity, e.g., complement regulatory proteins, e.g. proteins that bind decay-accelerating factor (DAF, CD55), e.g. factor H (FH)-like protein-1 (FHL-1), e.g. C4b-binding protein (C4BP), e.g. complement receptor 1 (CD35), e.g. Membrane cofactor protein (MCP, CD46), eg. Profectin (CD59), e.g. proteins that inhibit the classical and alternative compelement pathway CD/C5 convertase enzymes, e.g. proteins that regulate MAC assembly; e.g. increased expression of a complement regulatory protein compared to a reference retroviral vector or VLP, e.g. an unmodified retroviral vector or VLP from a cell otherwise similar to the source cell, a HEK293 cell, or a Jurkat cell.

[0606] In some embodiments, the increased expression level is at least 5%, 10%, 20%, 30%, 40%, 50%, 60%, 70%, 80%, 90%, 2-fold, 3-fold, 5-fold, 10-fold, 20-fold, 50-fold, or 100-fold higher as compared to a reference retroviral vector or VLP.

[0607] In some embodiments, the retroviral vector or VLP is derived from a source cell modified to have decreased expression of an immunostimulatory agent, e.g., one, two, three, four, five, six, seven, eight or more of the following:
[0608] a. less than 50%, 40%, 30%, 20%, 15%, 10%, or 5% or lesser expression of MHC class I or MHC class II, compared to a reference retroviral vector or VLP, e.g., an unmodified retroviral vector or VLP from a cell otherwise similar to the source cell, a HEK293 cell, or a HeLa cell;
[0609] b. less than 50%, 40%, 30%, 20%, 15%, 10%, or 5% or lesser expression of one or more co-stimulatory proteins including but not limited to: LAG3, ICOS-L, ICOS, Ox40L, OX40, CD28, B7, CD30, CD30L 4-1BB, 4-1BBL, SLAM, CD27, CD70, HVEM, LIGHT, B7-H3, or B7-H4, compared to a reference retroviral vector or VLP, e.g., an unmodified retroviral vector or VLP from a cell otherwise similar to the source cell, a HEK293 cell, or a reference cell described herein;
[0610] c. less than 50%, 40%, 30%, 20%, 15%, 10%, or 5% or lesser expression of soluble immune stimulating cytokines, e.g., IFN-gamma or TNF-α, compared to a reference retroviral vector or VLP, e.g., an unmodified retroviral vector or VLP from a cell otherwise similar to the source cell, a HEK293 cell, or a U-266 cell;
[0611] d. less than 50%, 40%, 30%, 20%, 15%, 10%, or 5% or lesser expression of endogenous immune-stimulatory antigen, e.g., Zg16 or Hormad1, compared to a reference retroviral vector or VLP, e.g., an unmodified retroviral vector or VLP from a cell otherwise similar to the source cell, a HEK293 cell, or an A549 cell or a SK-BR-3 cell;
[0612] e. less than 50%, 40%, 30%, 20%, 15%, 10%, or 5% or lesser expression of T-cell receptors (TCR) compared to a reference retroviral vector or VLP, e.g., an unmodified retroviral vector or VLP from a cell otherwise similar to the source cell, a HEK293 cell, or a Jurkat cell;
[0613] f. less than 50%, 40%, 30%, 20%, 15%, 10%, or 5% or lesser expression of ABO blood groups, compared to a reference retroviral vector or VLP, e.g., an unmodified retroviral vector or VLP from a cell otherwise similar to the source cell, a HEK293 cell, or a HeLa cell;
[0614] g. less than 50%, 40%, 30%, 20%, 15%, 10%, or 5% or lesser expression of transcription factors which drive immune activation, e.g., NFkB; compared to a reference retroviral vector or VLP, e.g., an unmodified retroviral vector or VLP from a cell otherwise similar to the source cell, a HEK293 cell, or a Jurkat cell
[0615] h. less than 50%, 40%, 30%, 20%, 15%, 10%, or 5% or lesser expression of transcription factors that control MHC expression, e.g., class II trans-activator (CIITA), regulatory factor of the Xbox 5 (RFXS), RFX-associated protein (RFXAP), or RFX ankyrin repeats (RFXANK; also known as RFXB) compared to a reference retroviral vector or VLP, e.g., an unmodified retroviral vector or VLP from a cell otherwise similar to the source cell, a HEK293 cell, or a Jurkat cell; or
[0616] i. less than 50%, 40%, 30%, 20%, 15%, 10%, or 5% or lesser expression of TAP proteins, e.g., TAP2, TAP1, or TAPBP, which reduce MHC class I expression compared to a reference retroviral vector or VLP, e.g., an unmodified retroviral vector or VLP from a cell otherwise similar to the source cell, a HEK293 cell, or a HeLa cell.

[0617] In some embodiments, a retroviral vector, VLP, or pharmaceutical composition derived from a mammalian cell, e.g., a HEK293, modified using shRNA expressing lentivirus to decrease MHC Class I expression, has lesser expression of MHC Class I compared to an unmodified retroviral vector or VLP, e.g., a retroviral vector or VLP from a cell (e.g., mesenchymal stem cell) that has not been modified. In some embodiments, a retroviral vector or VLP derived from a mammalian cell, e.g., a HEK293, modified using lentivirus expressing HLA-G to increase expression of HLA-G, has increased expression of HLA-G compared to an unmodified retroviral vector or VLP, e.g., from a cell (e.g., a HEK293) that has not been modified.

[0618] In some embodiments, the retroviral vector, VLP, or pharmaceutical composition is derived from a source cell, e.g., a mammalian cell, which is not substantially immunogenic, wherein the source cells stimulate, e.g., induce, T-cell IFN-gamma secretion, at a level of 0 pg/mL to >0 pg/mL, e.g., as assayed in vitro, by IFN-gamma ELISPOT assay.

[0619] In some embodiments, the retroviral vector, VLP, or pharmaceutical composition is derived from a source cell, e.g., a mammalian cell, wherein the mammalian cell is from a cell culture treated with an immunosuppressive agent, e.g., a glucocorticoid (e.g., dexamethasone), cytostatic (e.g., methotrexate), antibody (e.g., Muromonab-CD3), or immunophilin modulator (e.g., Ciclosporin or rapamycin).

[0620] In some embodiments, the retroviral vector, VLP, or pharmaceutical composition is derived from a source cell, e.g., a mammalian cell, wherein the mammalian cell comprises an exogenous agent, e.g., a therapeutic agent.

[0621] In some embodiments, the retroviral vector, VLP, or pharmaceutical composition is derived from a source cell, e.g., a mammalian cell, wherein the mammalian cell is a recombinant cell.

[0622] In some embodiments, the retroviral vector, VLP, or pharmaceutical is derived from a mammalian cell genetically modified to express viral immunoevasins, e.g., hCMV US2, or US11.

[0623] In some embodiments, the surface of the retroviral vector or VLP, or the surface of the source cell, is covalently or non-covalently modified with a polymer, e.g., a biocompatible polymer that reduces immunogenicity and immune-mediated clearance, e.g., PEG.

[0624] In some embodiments, the surface of the retroviral vector or VLP, or the surface of the source cell is covalently or non-covalently modified with a sialic acid, e.g., a sialic acid comprising glycopolymers, which contain NK-suppressive glycan epitopes.

[0625] In some embodiments, the surface of the retroviral vector or VLP, or the surface of the source cell is enzymatically treated, e.g., with glycosidase enzymes, e.g., α-N-acetylgalactosaminidases, to remove ABO blood groups

[0626] In some embodiments, the surface of the retroviral vector or VLP, or the surface of the source cell is enzymatically treated, to give rise to, e.g., induce expression of, ABO blood groups which match the recipient's blood type.

[0627] Parameters for Assessing Immunogenicity

[0628] In some embodiments, the retroviral vector or VLP is derived from a source cell, e.g., a mammalian cell which is not substantially immunogenic, or modified, e.g., modified using a method described herein, to have a reduction in immunogenicity. Immunogenicity of the source cell and the retroviral vector or VLP can be determined by any of the assays described herein.

[0629] In some embodiments, the retroviral vector or VLP has an increase, e.g., an increase of 1%, 5%, 10%, 20%, 30%, 40%, 50%, 60%, 70%, 80%, 90%, or more, in in vivo graft survival compared to a reference retroviral vector or VLP, e.g., an unmodified retroviral vector or VLP from a cell otherwise similar to the source cell.

[0630] In some embodiments, the retroviral vector or VLP has a reduction in immunogenicity as measured by a reduction in humoral response following one or more implantation of the retroviral vector or VLP into an appropriate animal model, e.g., an animal model described herein, compared to a humoral response following one or more implantation of a reference retroviral vector or VLP, e.g., an unmodified retroviral vector or VLP from a cell otherwise similar to the source cell, into an appropriate animal model, e.g., an animal model described herein. In some embodiments, the reduction in humoral response is measured in a serum sample by an anti-cell antibody titre, e.g., anti-retroviral or anti-VLP antibody titre, e.g., by ELISA. In some embodiments, the serum sample from animals administered the retroviral vector or VLP has a reduction of 1%, 5%, 10%, 20%, 30%, 40%, 50%, 60%, 70%, 80%, 90%, or more of an anti-retroviral or anti-VLP antibody titer compared to the serum sample from animals administered an unmodified retroviral vector or VLP. In some embodiments, the serum sample from animals administered the retroviral vector or VLP has an increased anti-retroviral or anti-VLP antibody titre, e.g., increased by 1%, 2%, 5%, 10%, 20%, 30%, or 40% from baseline, e.g., wherein baseline refers to serum sample from the same animals before administration of the retroviral vector or VLP.

[0631] In some embodiments, the retroviral vector or VLP has a reduction in macrophage phagocytosis, e.g., a reduction of 1%, 5%, 10%, 20%, 30%, 40%, 50%, 60%, 70%, 80%, 90%, or more in macrophage phagocytosis compared to a reference retroviral vector or VLP, e.g., an unmodified retroviral vector or VLP from a cell otherwise similar to the source cell, wherein the reduction in macrophage phagocytosis is determined by assaying the phagocytosis index in vitro, e.g., as described in Example 8. In some embodiments, the retroviral vector or VLP has a phagocytosis index of 0, 1, 10, 100, or more, e.g., as measured by an assay of Example 8, when incubated with macrophages in an in vitro assay of macrophage phagocytosis.

[0632] In some embodiments, the source cell or recipient cell has a reduction in cytotoxicity mediated cell lysis by PBMCs, e.g., a reduction of 1%, 5%, 10%, 20%, 30%, 40%, 50%, 60%, 70%, 80%, 90%, or more in cell lysis compared to a reference cell, e.g., an unmodified cell otherwise similar to the source cell, or a recipient cell that received an unmodified retroviral vector or VLP, or a mesenchymal stem cells, e.g., using an assay of Example 17. In embodiments, the source cell expresses exogenous HLA-G.

[0633] In some embodiments, the source cell or recipient cell has a reduction in NK-mediated cell lysis, e.g., a reduction of 1%, 5%, 10%, 20%, 30%, 40%, 50%, 60%, 70%, 80%, 90%, or more in NK-mediated cell lysis compared to a reference cell, e.g., an unmodified cell otherwise similar to the source cell, or a recipient cell that received an unmodified retroviral vector or VLP, wherein NK-mediated cell lysis is assayed in vitro, by a chromium release assay or europium release assay, e.g., using an assay of Example 18.

[0634] In some embodiments, the source cell or recipient cell has a reduction in CD8+ T-cell mediated cell lysis, e.g., a reduction of 1%, 5%, 10%, 20%, 30%, 40%, 50%, 60%, 70%, 80%, 90%, or more in CD8 T cell mediated cell lysis compared to a reference cell, e.g., an unmodified cell otherwise similar to the source cell, or a recipient cell that received an unmodified retroviral vector or VLP, wherein CD8 T cell mediated cell lysis is assayed in vitro, by an assay of Example 19.

[0635] In some embodiments, the source cell or recipient cell has a reduction in CD4+ T-cell proliferation and/or activation, e.g., a reduction of 1%, 5%, 10%, 20%, 30%, 40%, 50%, 60%, 70%, 80%, 90%, or more compared to a reference cell, e.g., an unmodified cell otherwise similar to the source cell, or a recipient cell that received an unmodified retroviral vector or VLP, wherein CD4 T cell proliferation is assayed in vitro (e.g. co-culture assay of modified or unmodified mammalian source cell, and CD4+ T-cells with CD3/CD28 Dynabeads).

[0636] In some embodiments, the retroviral vector or VLP causes a reduction in T-cell IFN-gamma secretion, e.g., a reduction of 1%, 5%, 10%, 20%, 30%, 40%, 50%, 60%, 70%, 80%, 90%, or more in T-cell IFN-gamma secretion compared to a reference retroviral vector or VLP, e.g., an unmodified retroviral vector or VLP from a cell otherwise similar to the source cell, wherein T-cell IFN-gamma secretion is assayed in vitro, e.g., by IFN-gamma ELISPOT.

[0637] In some embodiments, the retroviral vector or VLP causes a reduction in secretion of immunogenic cytokines, e.g., a reduction of 1%, 5%, 10%, 20%, 30%, 40%, 50%, 60%, 70%, 80%, 90%, or more in secretion of immunogenic cytokines compared to a reference retroviral vector or VLP, e.g., an unmodified retroviral vector or VLP from a cell otherwise similar to the source cell, wherein secretion of immunogenic cytokines is assayed in vitro using ELISA or ELISPOT.

[0638] In some embodiments, the retroviral vector or VLP results in increased secretion of an immunosuppressive cytokine, e.g., an increase of 1%, 5%, 10%, 20%, 30%, 40%, 50%, 60%, 70%, 80%, 90%, or more in secretion of an immunosuppressive cytokine compared to a reference retroviral vector or VLP, e.g., an unmodified retroviral vector or VLP from a cell otherwise similar to the source cell, wherein secretion of the immunosuppressive cytokine is assayed in vitro using ELISA or ELISPOT.

[0639] In some embodiments, the retroviral vector or VLP has an increase in expression of HLA-G or HLA-E, e.g., an increase in expression of 1%, 5%, 10%, 20%, 30%, 40%, 50%, 60%, 70%, 80%, 90%, or more of HLA-G or HLA-E, compared to a reference retroviral vector or VLP, e.g., an unmodified retroviral vector or VLP from a cell otherwise similar to the source cell, wherein expression of HLA-G or HLA-E is assayed in vitro using flow cytometry, e.g., FACS. In some embodiments, the retroviral vector or VLP is derived from a source cell which is modified to have an increased expression of HLA-G or HLA-E, e.g., compared to an unmodified cell, e.g., an increased expression of 1%, 5%, 10%, 20%, 30%, 40%, 50%, 60%, 70%, 80%, 90%, or more of HLA-G or HLA-E, wherein expression of HLA-G or HLA-E is assayed in vitro using flow cytometry, e.g., FACS. In some embodiments, the retroviral vector or VLP derived from a modified cell with increased HLA-G expression demonstrates reduced immunogenicity.

[0640] In some embodiments, the retroviral vector or VLP has or causes an increase in expression of T cell inhibitor ligands (e.g. CTLA4, PD1, PD-L1), e.g., an increase in expression of 1%, 5%, 10%, 20%, 30%, 40%, 50%, 60%, 70%, 80%, 90%, or more of T cell inhibitor ligands as compared to a reference retroviral vector or VLP, e.g., an unmodified retroviral vector or VLP from a cell otherwise similar to the source cell, wherein expression of T cell inhibitor ligands is assayed in vitro using flow cytometry, e.g., FACS.

[0641] In some embodiments, the retroviral vector or VLP has a decrease in expression of co-stimulatory ligands, e.g., a decrease of 1%, 5%, 10%, 20%, 30%, 40%, 50%, 60%, 70%, 80%, 90%, or more in expression of co-stimulatory ligands compared to a reference retroviral vector or VLP, e.g., an unmodified retroviral vector or VLP from a cell otherwise similar to the source cell, wherein expression of co-stimulatory ligands is assayed in vitro using flow cytometry, e.g., FACS.

[0642] In some embodiments, the retroviral vector or VLP has a decrease in expression of MHC class I or MHC class II, e.g., a decrease in expression of 1%, 5%, 10%, 20%, 30%, 40%, 50%, 60%, 70%, 80%, 90%, or more of MHC Class I or MHC Class II compared to a reference retroviral vector or VLP, e.g., an unmodified retroviral vector or VLP from a cell otherwise similar to the source cell or a HeLa cell, wherein expression of MHC Class I or II is assayed in vitro using flow cytometry, e.g., FACS.

[0643] In some embodiments, the retroviral vector or VLP is derived from a cell source, e.g., a mammalian cell source, which is substantially non-immunogenic. In some embodiments, immunogenicity can be quantified, e.g., as described herein. In some embodiments, the mammalian cell source comprises any one, all or a combination of the following features:
[0644] a. wherein the source cell is obtained from an autologous cell source; e.g., a cell obtained from a recipient who will be receiving, e.g., administered, the retroviral vector or VLP;
[0645] b. wherein the source cell is obtained from an allogeneic cell source which is of matched, e.g., similar, gender to a recipient, e.g., a recipient described herein who will be receiving, e.g., administered; the retroviral vector or VLP;
[0646] c. wherein the source cell is obtained is from an allogeneic cell source is which is HLA matched with a recipient's HLA, e.g., at one or more alleles;
[0647] d. wherein the source cell is obtained is from an allogeneic cell source which is an HLA homozygote;
[0648] e. wherein the source cell is obtained is from an allogeneic cell source which lacks (or has reduced levels compared to a reference cell) MHC class I and II; or
[0649] f. wherein the source cell is obtained is from a cell source which is known to be substantially non-immunogenic including but not limited to a stem cell, a mesenchymal stem cell, an induced pluripotent stem cell, an embryonic stem cell, a sertoli cell, or a retinal pigment epithelial cell.

[0650] In some embodiments, the subject to be administered the retroviral vector or VLP has, or is known to have, or is tested for, a pre-existing antibody (e.g., IgG or IgM) reactive with a retroviral vector or VLP. In some embodiments, the subject to be administered the retroviral vector or VLP does not have detectable levels of a pre-existing antibody reactive with the retroviral vector or VLP. Tests for the antibody are described, e.g., in Example 13.

[0651] In some embodiments, a subject that has received the retroviral vector or VLP has, or is known to have, or is tested for, an antibody (e.g., IgG or IgM) reactive with a retroviral vector or VLP. In some embodiments, the subject that received the retroviral vector or VLP (e.g., at least once, twice, three times, four times, five times, or more) does not have detectable levels of antibody reactive with the retroviral vector or VLP. In embodiments, levels of antibody do not rise more than 1%, 2%, 5%, 10%, 20%, or 50% between two timepoints, the first timepoint being before the first administration of the retroviral vector or VLP, and the second timepoint being after one or more administrations of the retroviral vector or VLP. Tests for the antibody are described, e.g., in Example 14.

### VI. Exogenous Agents

[0652] In some embodiments, a fusosome, e.g. retroviral vector, VLP, or pharmaceutical composition described herein contains an exogenous agent. In some embodiments, the fusosome, e.g. a retroviral vector, VLP, or pharmaceutical composition described herein contains a nucleic acid that encodes an exogenous agent.

### A. Exogenous Protein Agents

[0653] In some embodiments, the exogenous agent comprises a cytosolic protein, e.g., a protein that is produced in the recipient cell and localizes to the recipient cell cytoplasm. In some embodiments, the exogenous agent comprises a secreted protein, e.g., a protein that is produced and secreted by the recipient cell. In some embodiments, the exogenous agent comprises a nuclear protein, e.g., a protein that is produced in the recipient cell and is imported to the nucleus of the recipient cell. In some embodiments, the exogenous agent comprises an organellar protein (e.g., a mitochondrial protein), e.g., a protein that is produced in the recipient cell and is imported into an organelle (e.g., a mitochondrial) of the recipient cell. In some embodiments, the protein is a wild-type protein or a mutant protein. In some embodiments the protein is a fusion or chimeric protein.

[0654] In some embodiments, the exogenous agent comprises a protein of Table 5 below. In some embodiments, the exogenous agent comprises the wild-type human sequence of any of the proteins of Table 5, a functional fragment thereof (e.g., an enzymatically active fragment thereof), or a functional variant thereof. In some embodiments, the exogenous agent comprises an amino acid sequence having at least 70%, 75%, 80%, 85%, 90%, 95%, 96%, 97%, 98%, or 99%, identity to an amino acid sequence of Table 5, e.g., a Uniprot Protein Accession Number sequence of column 4 of Table 5 or an amino acid sequence of column 5 of Table 5. In some embodiments, the payload gene encodes an amino acid sequence having at least 70%, 75%, 80%, 85%, 90%, 95%, 96%, 97%, 98%, or 99%, identity to an amino acid sequence of Table 5. In some embodiments, the payload gene has a nucleic acid sequence having at least 70%, 75%, 80%, 85%, 90%, 95%, 96%, 97%, 98%, or 99%, identity to a nucleic acid sequence of Table 5, e.g., an Ensemble Gene Accession Number of column 3 of Table 5.

[0655] In some embodiments, the exogenous agent comprises the wild-type human sequence set forth in any of SEQ ID NOSs: 151-178, a functional fragment thereof (e.g., an enzymatically active fragment thereof), or a functional variant thereof. In some embodiments, the exogenous agent comprises an amino acid sequence having at least 70%, 75%, 80%, 85%, 90%, 95%, 96%, 97%, 98%, or 99%, identity to an amino acid sequence set forth in any of SEQ ID Nos: 151-178. In some embodiments, the payload gene has a nucleic acid sequence having at least 70%, 75%, 80%, 85%, 90%, 95%, 96%, 97%, 98%, or 99%, identity to a nucleic acid sequence of encoding any of the sequence set forth in any of SEQ ID NOS: 151-178.

TABLE 5
Hematopoietic stem cell-related diseases or disorders. The first column lists
exogenous agents that can be delivered to treat the indications in the sixth column,
according to the methods and uses herein. Each Uniprot accession number of Table 5 is
herein incorporated by reference in its entirety.

| | | Ensembl | | | | |
|---|---|---|---|---|---|---|
| | | Gene(s) | | | | |
| | | Accession | | | | |
| | | Number | Uniprot | | | |
| | Entrez | (ENSG0000+ | Protein(s) | | | |
| | Accession | number | Accession | Amino Acid Sequence (first | Disease / | SEQ ID |
| Gene | Number | shown) | Number | Uniprot Accession Number) | Disorder | NO |
| ADA | 100 | 0196839 | P00813 | MAQTPAFDKPKVELHVHLDGSI | ADA | 151 |
| | | | | KPETILYYGRRRGIALPANTAEG | SCID | |
| | | | | LLNVIGMDKPLTLPDFLAKFDYY | | |
| | | | | MPAIAGCREAIKRIAYEFVEMKA | | |
| | | | | KEGVVYVEVRYSPHLLANSKVE | | |
| | | | | PIPWNQAEGDLTPDEVVALVGQ | | |
| | | | | GLQEGERDFGVKARSILCCMRH | | |
| | | | | QPNWSPKVVELCKKYQQQTVV | | |
| | | | | AIDLAGDETIPGSSLLPGHVQAY | | |
| | | | | QEAVKSGIHRTVHAGEVGSAEV | | |
| | | | | VKEAVDILKTERLGHGYHTLED | | |
| | | | | QALYNRLRQENMHFEICPWSSY | | |
| | | | | LTGAWKPDTEHAVIRLKNDQAN | | |
| | | | | YSLNTDDPLIFKSTLDTDYQMTK | | |
| | | | | RDMGFTEEEFKRLNINAAKSSFL | | |
| | | | | PEDEKRELLDLLYKAYGMPPSAS | | |
| | | | | AGQNL | | |
| IL2RG | 3561 | 0147168 | P31785 | MLKPSLPFTSLLFLQLPLLGVGL | X-Linked | 152 |
| | | | | NTTILTPNGNEDTTADFFLTTMP | SCID | |
| | | | | TDSLSVSTLPLPEVQCFVFNVEY | | |
| | | | | MNCTWNSSSEPQPTNLTLHYWY | | |
| | | | | KNSDNDKVQKCSHYLFSEEITSG | | |
| | | | | CQLQKKEIHLYQTFVVQLQDPRE | | |
| | | | | PRRQATQMLKLQNLVIPWAPEN | | |
| | | | | LTLHKLSESQLELNWNNRFLNH | | |
| | | | | CLEHLVQYRTDWDHSWTEQSV | | |
| | | | | DYRHKFSLPSVDGQKRYTFRVR | | |
| | | | | SRFNPLCGSAQHWSEWSHPIHW | | |
| | | | | GSNTSKENPFLFALEAVVISVGS | | |
| | | | | MGLIISLLCVYFWLERTMPRIPTL | | |
| | | | | KNLEDLVTEYHGNFSAWSGVSK | | |
| | | | | GLAESLQPDYSERLCLVSEIPPKG | | |
| | | | | GALGEGPGASPCNQHSPYWAPP | | |
| | | | | CYTLKPET | | |
| JAK3 | 3718 | 0105639 | P52333 | MAPPSEETPLIPQRSCSLLSTEAG | Jak-3 | 153 |
| | | | | ALHVLLPARGPGPPQRLSFSFGD | SCID | |
| | | | | HLAEDLCVQAAKASGILPVYHSL | | |
| | | | | FALATEDLSCWFPPSHIFSVEDAS | | |
| | | | | TQVLLYRIRFYFPNWFGLEKCHR | | |
| | | | | FGLRKDLASAILDLPVLEHLFAQ | | |
| | | | | HRSDLVSGRLPVGLSLKEQGECL | | |
| | | | | SLAVLDLARMAREQAQRPGELL | | |
| | | | | KTVSYKACLPPSLRDLIQGLSFV | | |
| | | | | TRRRIRRTVRRALRRVAACQAD | | |
| | | | | RHSLMAKYIMDLERLDPAGAAE | | |
| | | | | TFHVGLPGALGGHDGLGLLRVA | | |
| | | | | GDGGIAWTQGEQEVLQPFCDFP | | |
| | | | | EIVDISIKQAPRVGPAGEHRLVTV | | |
| | | | | TRTDNQILEAEFPGLPEALSFVAL | | |
| | | | | VDGYFRLTTDSQHFFCKEVAPPR | | |
| | | | | LLEEVAEQCHGPITLDFAINKLK | | |
| | | | | TGGSRPGSYVLRRSPQDFDSFLL | | |
| | | | | TVCVQNPLGPDYKGCLIRRSPTG | | |
| | | | | TFLLVGLSRPHSSLRELLATCWD | | |
| | | | | GGLHVDGVAVTLTSCCIPRPKEK | | |
| | | | | SNLIVVQRGHSPPTSSLVQPQSQ | | |
| | | | | YQLSQMTFHKIPADSLEWHENL | | |
| | | | | GHGSFTKIYRGCRHEVVDGEAR | | |
| | | | | KTEVLLKVMDAKHKNCMESFLE | | |
| | | | | AASLMSQVSYRHLVLLHGVCM | | |
| | | | | AGDSTMVQEFVHLGAIDMYLRK | | |
| | | | | RGHLVPASWKLQVVKQLAYAL | | |
| | | | | NYLEDKGLPHGNVSARKVLLAR | | |
| | | | | EGADGSPPFIKLSDPGVSPAVLSL | | |
| | | | | EMLTDRIPWVAPECLREAQTLSL | | |
| | | | | EADKWGFGATVWEVFSGVTMPI | | |
| | | | | SALDPAKKLQFYEDRQQLPAPK | | |
| | | | | WTELALLIQQCMAYEPVQRPSFR | | |
| | | | | AVIRDLNSLISSDYELLSDPTPGA | | |
| | | | | LAPRDGLWNGAQLYACQDPTIF | | |
| | | | | EERHLKYISQLGKGNFGSVELCR | | |
| | | | | YDPLGDNTGALVAVKQLQHSGP | | |
| | | | | DQQRDFQREIQILKALHSDFIVK | | |
| | | | | YRGVSYGPGRQSLRLVMEYLPS | | |
| | | | | GCLRDFLQRHRARLDASRLLLYS | | |
| | | | | SQICKGMEYLGSRRCVHRDLAA | | |
| | | | | RNILVESEAHVKIADFGLAKLLP | | |
| | | | | LDKDYYVVREPGQSPIFWYAPES | | |
| | | | | LSDNIFSRQSDVWSFGVVLYELF | | |
| | | | | TYCDKSCSPSAEFLRMMGCERD | | |
| | | | | VPALCRLLELLEEGQRLPAPPAC | | |
| | | | | PAEVSAAGLASVSQSVDWAGVS | | |
| | | | | GKPAGA | | |
| IL7R | 3575 | 0168685 | P16871 | MTILGTTFGMVFSLLQVVSGESG | IL7R | 154 |
| | | | | YAQNGDLEDAELDDYSFSCYSQ | SCID | |
| | | | | LEVNGSQHSLTCAFEDPDVNITN | | |
| | | | | LEFEICGALVEVKCLNFRKLQEI | | |
| | | | | YFIETKKFLLIGKSNICVKVGEKS | | |
| | | | | LTCKKIDLTTIVKPEAPFDLSVVY | | |
| | | | | REGANDFVVTFNTSHLQKKYVK | | |
| | | | | VLMHDVAYRQEKDENKWTHVN | | |
| | | | | LSSTKLTLLQRKLQPAAMYEIKV | | |
| | | | | RSIPDHYFKGFWSEWSPSYYFRT | | |
| | | | | PEINNSSGEMDPILLTISILSFFSV | | |
| | | | | ALLVILACVLWKKRIKPIVWPSL | | |
| | | | | PDHKKTLEHLCKKPRKNLNVSF | | |
| | | | | NPESFLDCQIHRVDDIQARDEVE | | |
| | | | | GFLQDTFPQQLEESEKQRLGGDV | | |
| | | | | QSPNCPSEDVVITPESFGRDSSLT | | |
| | | | | CLAGNVSACDAPILSSSRSLDCR | | |
| | | | | ESGKNGPHVYQDLLLSLGTTNST | | |
| | | | | LPPPFSLQSGILTLNPVAQGQPIL | | |
| | | | | TSLGSNQEEAYVTMSSFYQNQ | | |
| HBB | 3043 | 0244734 | P68871 | MVHLTPEEKSAVTALWGKVNV | Thalassemia | 155 |
| | | | | DEVGGEALGRLLVVYPWTQRFF | Major; | |
| | | | | ESFGDLSTPDAVMGNPKVKAHG | Sickle | |
| | | | | KKVLGAFSDGLAHLDNLKGTFA | Cell | |
| | | | | TLSELHCDKLHVDPENFRLLGNV | Disease | |
| | | | | LVCVLAHHFGKEFTPPVQAAYQ | | |
| | | | | KVVAGVANALAHKYH | | |
| F8 | 2157 | 0185010 | P00451 | MQIELSTCFFLCLLRFCFSATRRY | Hemophilia A | 156 |
| | | | | YLGAVELSWDYMQSDLGELPVD | | |
| | | | | ARFPPRVPKSFPFNTSVVYKKTL | | |
| | | | | FVEFTDHLFNIAKPRPPWMGLLG | | |
| | | | | PTIQAEVYDTVVITLKNMASHPV | | |
| | | | | SLHAVGVSYWKASEGAEYDDQ | | |
| | | | | TSQREKEDDKVFPGGSHTYVWQ | | |
| | | | | VLKENGPMASDPLCLTYSYLSH | | |
| | | | | VDLVKDLNSGLIGALLVCREGSL | | |
| | | | | AKEKTQTLHKFILLFAVFDEGKS | | |
| | | | | WHSETKNSLMQDRDAASARAW | | |
| | | | | PKMHTVNGYVNRSLPGLIGCHR | | |
| | | | | KSVYWHVIGMGTTPEVHSIFLEG | | |
| | | | | HTFLVRNHRQASLEISPITFLTAQ | | |
| | | | | TLLMDLGQFLLFCHISSHQHDG | | |
| | | | | MEAYVKVDSCPEEPQLRMKNNE | | |
| | | | | EAEDYDDDLTDSEMDVVRFDDD | | |
| | | | | NSPSFIQIRSVAKKHPKTWVHYI | | |
| | | | | AAEEEDWDYAPLVLAPDDRSYK | | |
| | | | | SQYLNNGPQRIGRKYKKVRFMA | | |
| | | | | YTDETFKTREAIQHESGILGPLLY | | |
| | | | | GEVGDTLLIIFKNQASRPYNIYPH | | |
| | | | | GITDVRPLYSRRLPKGVKHLKDF | | |
| | | | | PILPGEIFKYKWTVTVEDGPTKS | | |
| | | | | DPRCLTRYYSSFVNMERDLASG | | |
| | | | | LIGPLLICYKESVDQRGNQIMSD | | |
| | | | | KRNVILFSVFDENRSWYLTENIQ | | |
| | | | | RFLPNPAGVQLEDPEFQASNIMH | | |
| | | | | SINGYVFDSLQLSVCLHEVAYW | | |
| | | | | YILSIGAQTDFLSVFFSGYTFKHK | | |
| | | | | MVYEDTLTLFPFSGETVFMSME | | |
| | | | | NPGLWILGCHNSDFRNRGMTAL | | |
| | | | | LKVSSCDKNTGDYYEDSYEDISA | | |
| | | | | YLLSKNNAIEPRSFSQNSRHPSTR | | |
| | | | | QKQFNATTIPENDIEKTDPWFAH | | |
| | | | | RTPMPKIQNVSSSDLLMLLRQSP | | |
| | | | | TPHGLSLSDLQEAKYETFSDDPS | | |
| | | | | PGAIDSNNSLSEMTHFRPQLHHS | | |
| | | | | GDMVFTPESGLQLRLNEKLGTT | | |
| | | | | AATELKKLDFKVSSTSNNLISTIP | | |
| | | | | SDNLAAGTDNTSSLGPPSMPVH | | |
| | | | | YDSQLDTTLFGKKSSPLTESGGP | | |
| | | | | LSLSEENNDSKLLESGLMNSQES | | |
| | | | | SWGKNVSSTESGRLFKGKRAHG | | |
| | | | | PALLTKDNALFKVSISLLKTNKT | | |
| | | | | SNNSATNRKTHIDGPSLLIENSPS | | |
| | | | | VWQNILESDTEFKKVTPLIHDRM | | |
| | | | | LMDKNATALRLNHMSNKTTSSK | | |
| | | | | NMEMVQQKKEGPIPPDAQNPDM | | |
| | | | | SFFKMLFLPESARWIQRTHGKNS | | |
| | | | | LNSGQGPSPKQLVSLGPEKSVEG | | |
| | | | | QNFLSEKNKVVVGKGEFTKDVG | | |
| | | | | LKEMVFPSSRNLFLTNLDNLHEN | | |
| | | | | NTHNQEKKIQEEIEKKETLIQEN | | |
| | | | | VVLPQIHTVTGTKNFMKNLFLLS | | |
| | | | | TRQNVEGSYDGAYAPVLQDFRS | | |
| | | | | LNDSTNRTKKHTAHFSKKGEEE | | |
| | | | | NLEGLGNQTKQIVEKYACTTRIS | | |
| | | | | PNTSQQNFVTQRSKRALKQFRLP | | |
| | | | | LEETELEKRIIVDDTSTQWSKNM | | |
| | | | | KHLTPSTLTQIDYNEKEKGAITQ | | |
| | | | | SPLSDCLTRSHSIPQANRSPLPIA | | |
| | | | | KVSSFPSIRPIYLTRVLFQDNSSH | | |
| | | | | LPAASYRKKDSGVQESSHFLQG | | |
| | | | | AKKNNLSLAILTLEMTGDQREV | | |
| | | | | GSLGTSATNSVTYKKVENTVLP | | |
| | | | | KPDLPKTSGKVELLPKVHIYQKD | | |
| | | | | LFPTETSNGSPGHLDLVEGSLLQ | | |
| | | | | GTEGAIKWNEANRPGKVPFLRV | | |
| | | | | ATESSAKTPSKLLDPLAWDNHY | | |
| | | | | GTQIPKEEWKSQEKSPEKTAFKK | | |
| | | | | KDTILSLNACESNHAIAAINEGQ | | |
| | | | | NKPEIEVTWAKQGRTERLCSQNP | | |
| | | | | PVLKRHQREITRTTLQSDQEEID | | |
| | | | | YDDTISVEMKKEDFDIYDEDENQ | | |
| | | | | SPRSFQKKTRHYFIAAVERLWDY | | |
| | | | | GMSSSPHVLRNRAQSGSVPQFK | | |
| | | | | KVVFQEFTDGSFTQPLYRGELNE | | |
| | | | | HLGLLGPYIRAEVEDNIMVTFRN | | |
| | | | | QASRPYSFYSSLISYEEDQRQGA | | |
| | | | | EPRKNFVKPNETKTYFWKVQHH | | |
| | | | | MAPTKDEFDCKAWAYFSDVDLE | | |
| | | | | KDVHSGLIGPLLVCHTNTLNPAH | | |
| | | | | GRQVTVQEFALFFTIFDETKSWY | | |
| | | | | FTENMERNCRAPCNIQMEDPTFK | | |
| | | | | ENYRFHAINGYIMDTLPGLVMA | | |
| | | | | QDQRIRWYLLSMGSNENIHSIHF | | |
| | | | | SGHVFTVRKKEEYKMALYNLYP | | |
| | | | | GVFETVEMLPSKAGIWRVECLIG | | |
| | | | | EHLHAGMSTLFLVYSNKCQTPL | | |
| | | | | GMASGHIRDFQITASGQYGQWA | | |
| | | | | PKLARLHYSGSINAWSTKEPFSW | | |
| | | | | IKVDLLAPMIIHGIKTQGARQKFS | | |
| | | | | SLYISQFIIMYSLDGKKWQTYRG | | |
| | | | | NSTGTLMVFFGNVDSSGIKHNIF | | |
| | | | | NPPIIARYIRLHPTHYSIRSTLRME | | |
| | | | | LMGCDLNSCSMPLGMESKAISD | | |
| | | | | AQITASSYFTNMFATWSPSKARL | | |
| | | | | HLQGRSNAWRPQVNNPKEWLQ | | |
| | | | | VDFQKTMKVTGVTTQGVKSLLT | | |
| | | | | SMYVKEFLISSSQDGHQWTLFFQ | | |
| | | | | NGKVKVFQGNQDSFTPVVNSLD | | |
| | | | | PPLLTRYLRIHPQSWVHQIALRM | | |
| | | | | EVLGCEAQDLY | | |
| F9 | 2158 | 0101981 | P00740 | MQRVNMIMAESPGLITICLLGYL | Hemophilia B | 157 |
| | | | | LSAECTVFLDHENANKILNRPKR | | |
| | | | | YNSGKLEEFVQGNLERECMEEK | | |
| | | | | CSFEEAREVFENTERTTEFWKQY | | |
| | | | | VDGDQCESNPCLNGGSCKDDIN | | |
| | | | | SYECWCPFGFEGKNCELDVTCNI | | |
| | | | | KNGRCEQFCKNSADNKVVCSCT | | |
| | | | | EGYRLAENQKSCEPAVPFPCGRV | | |
| | | | | SVSQTSKLTRAETVFPDVDYVNS | | |
| | | | | TEAETILDNITQSTQSFNDFTRVV | | |
| | | | | GGEDAKPGQFPWQVVLNGKVD | | |
| | | | | AFCGGSIVNEKWIVTAAHCVET | | |
| | | | | GVKITVVAGEHNIEETEHTEQKR | | |
| | | | | NVIRIIPHHNYNAAINKYNHDIAL | | |
| | | | | LELDEPLVLNSYVTPICIADKEYT | | |
| | | | | NIFLKFGSGYVSGWGRVFHKGR | | |
| | | | | SALVLQYLRVPLVDRATCLRSTK | | |
| | | | | FTIYNNMFCAGFHEGGRDSCQG | | |
| | | | | DSGGPHVTEVEGTSFLTGIISWG | | |
| | | | | EECAMKGKYGIYTKVSRYVNWI | | |
| | | | | KEKTKLT | | |
| WAS | 7454 | 0015285 | P42768 | MSGGPMGGRPGGRGAPAVQQNI | Wiskott- | 158 |
| | | | | PSTLLQDHENQRLFEMLGRKCLT | Aldrich | |
| | | | | LATAVVQLYLALPPGAEHWTKE | Syndrome | |
| | | | | HCGAVCFVKDNPQKSYFIRLYG | | |
| | | | | LQAGRLLWEQELYSQLVYSTPTP | | |
| | | | | IMHTFAGDDCQAGLNFADEDEA | | |
| | | | | QAFRALVQEKIQKRNQRQSGDR | | |
| | | | | RQLPPPPTPANEERRGGLPPLPLH | | |
| | | | | PGGDQGGPPVGPLSLGLATVDIQ | | |
| | | | | NPDITSSRYRGLPAPGPSPADKK | | |
| | | | | RSGKKKISKADIGAPSGFKHVSH | | |
| | | | | VGWDPQNGFDVNNLDPDLRSLF | | |
| | | | | SRAGISEAQLTDAETSKLIYDFIE | | |
| | | | | DQGGLEAVRQEMRRQEPLPPPPP | | |
| | | | | PSRGGNQLPRPPIVGGNKGRSGP | | |
| | | | | LPPVPLGIAPPPPTPRGPPPPGRG | | |
| | | | | GPPPPPPPATGRSGPLPPPPPGAG | | |
| | | | | GPPMPPPPPPPPPPPSSGNGPAPPP | | |
| | | | | LPPALVPAGGLAPGGGRGALLD | | |
| | | | | QIRQGIQLNKTPGAPESSALQPPP | | |
| | | | | QSSEGLVGALMHVMQKRSRAIH | | |
| | | | | SSDEGEDQAGDEDEDDEWDD | | |
| CYBA | 1535 | 0051523 | P13498 | MGQIEWAMWANEQALASGLILI | Chronic | 159 |
| | | | | TGGIVATAGRFTQWYFGAYSIV | Granulomatous | |
| | | | | AGVFVCLLEYPRGKRKKGSTME | Disease | |
| | | | | RWGQKYMTAVVKLFGPFTRNY | | |
| | | | | YVRAVLHLLLSVPAGFLLATILG | | |
| | | | | TACLAIASGIYLLAAVRGEQWTP | | |
| | | | | IEPKPRERPQIGGTIKQPPSNPPPR | | |
| | | | | PPAEARKKPSEEEAAVAAGGPPG | | |
| | | | | GPQVNPIPVTDEVV | | |
| CYBB | 1536 | 0165168 | P04839 | MGNWAVNEGLSIFVILVWLGLN | Chronic | 160 |
| | | | | VFLFVWYYRVYDIPPKFFYTRKL | Granulomatous | |
| | | | | LGSALALARAPAACLNFNCMLIL | Disease | |
| | | | | LPVCRNLLSFLRGSSACCSTRVR | | |
| | | | | RQLDRNLTFHKMVAWMIALHS | | |
| | | | | AIHTIAHLFNVEWCVNARVNNS | | |
| | | | | DPYSVALSELGDRQNESYLNFAR | | |
| | | | | KRIKNPEGGLYLAVTLLAGITGV | | |
| | | | | VITLCLILIITSSTKTIRRSYFEVF | | |
| | | | | WYTHHLFVIFFIGLAIHGAERIVR | | |
| | | | | GQTAESLAVHNITVCEQKISEWG | | |
| | | | | KIKECPIPQFAGNPPMTWKWIVG | | |
| | | | | PMFLYLCERLVRFWRSQQKVVI | | |
| | | | | TKVVTHPFKTIELQMKKKGFKM | | |
| | | | | EVGQYIFVKCPKVSKLEWHPFTL | | |
| | | | | TSAPEEDFFSIHIRIVGDWTEGLF | | |
| | | | | NACGCDKQEFQDAWKLPKIAVD | | |
| | | | | GPFGTASEDVFSYEVVMLVGAGI | | |
| | | | | GVTPFASILKSVWYKYCNNATN | | |
| | | | | LKLKKIYFYWLCRDTHAFEWFA | | |
| | | | | DLLQLLESQMQERNNAGFLSYNI | | |
| | | | | YLTGWDESQANHFAVHHDEEK | | |
| | | | | DVITGLKQKTLYGRPNWDNEFK | | |
| | | | | TIASQHPNTRIGVFLCGPEALAET | | |
| | | | | LSKQSISNSESGPRGVHFIFNKEN | | |
| | | | | F | | |
| NCF1 | 653361 | 0158517 | P14598 | MGDTFIRHIALLGFEKRFVPSQH | Chronic | 161 |
| | | | | YVYMFLVKWQDLSEKVVYRRF | Granulomatous | |
| | | | | TEIYEFHKTLKEMFPIEAGAINPE | Disease | |
| | | | | NRIIPHLPAPKWFDGQRAAENRQ | | |
| | | | | GTLTEYCSTLMSLPTKISRCPHLL | | |
| | | | | DFFKVRPDDLKLPTDNQTKKPET | | |
| | | | | YLMPKDGKSTATDITGPIILQTYR | | |
| | | | | AIANYEKTSGSEMALSTGDVVE | | |
| | | | | VVEKSESGWWFCQMKAKRGWI | | |
| | | | | PASFLEPLDSPDETEDPEPNYAGE | | |
| | | | | PYVAIKAYTAVEGDEVSLLEGEA | | |
| | | | | VEVIHKLLDGWWVIRKDDVTGY | | |
| | | | | FPSMYLQKSGQDVSQAQRQIKR | | |
| | | | | GAPPRRSSIRNAHSIHQRSRKRLS | | |
| | | | | QDAYRRNSVRFLQQRRRQARPG | | |
| | | | | PQSPGSPLEEERQTQRSKPQPAV | | |
| | | | | PPRPSADLILNRCSESTKRKLASA | | |
| | | | | V | | |
| NCF2 | 4688 | 0116701 | P19878 | MSLVEAISLWNEGVLAADKKD | Chronic | 162 |
| | | | | WKGALDAFSAVQDPHSRICFNIG | Granulomatous | |
| | | | | CMYTILKNMTEAEKAFTRSINRD | Disease | |
| | | | | KHLAVAYFQRGMLYYQTEKYD | | |
| | | | | LAIKDLKEALIQLRGNQLIDYKIL | | |
| | | | | GLQFKLFACEVLYNIAFMYAKK | | |
| | | | | EEWKKAEEQLALATSMKSEPRH | | |
| | | | | SKIDKAMECVWKQKLYEPVVIP | | |
| | | | | VGKLFRPNERQVAQLAKKDYLG | | |
| | | | | KATVVASVVDQDSFSGFAPLQP | | |
| | | | | QAAEPPPRPKTPEIFRALEGEAHR | | |
| | | | | VLFGFVPETKEELQVMPGNIVFV | | |
| | | | | LKKGNDNWATVMFNGQKGLVP | | |
| | | | | CNYLEPVELRIHPQQQPQEESSP | | |
| | | | | QSDIPAPPSSKAPGRPQLSPGQKQ | | |
| | | | | KEEPKEVKLSVPMPYTLKVHYK | | |
| | | | | YTVVMKTQPGLPYSQVRDMVS | | |
| | | | | KKLELRLEHTKLSYRPRDSNELV | | |
| | | | | PLSEDSMKDAWGQVKNYCLTL | | |
| | | | | WCENTVGDQGFPDEPKESEKAD | | |
| | | | | ANNQTTEPQLKKGSQVEALFSY | | |
| | | | | EATQPEDLEFQEGDIILVLSKVNE | | |
| | | | | EWLEGECKGKVGIFPKVFVEDC | | |
| | | | | ATTDLESTRREV | | |
| NCF4 | 4689 | 0100365 | Q15080 | MAVAQQLRAESDFEQLPDDVAI | Chronic | 163 |
| | | | | SANIADIEEKRGFTSHFVFVIEVK | Granulomatous | |
| | | | | TKGGSKYLIYRRYRQFHALQSKL | Disease | |
| | | | | EERFGPDSKSSALACTLPTLPAK | | |
| | | | | VYVGVKQEIAEMRIPALNAYMK | | |
| | | | | SLLSLPVWVLMDEDVRIFFYQSP | | |
| | | | | YDSEQVPQALRRLRPRTRKVKS | | |
| | | | | VSPQGNSVDRMAAPRAEALFDF | | |
| | | | | TGNSKLELNFKAGDVIFLLSRIN | | |
| | | | | KDWLEGTVRGATGIFPLSFVKIL | | |
| | | | | KDFPEEDDPTNWLRCYYYEDTIS | | |
| | | | | TIKDIAVEEDLSSTPLLKDLLELT | | |
| | | | | RREFQREDIALNYRDAEGDLVRL | | |
| | | | | LSDEDVALMVRQARGLPSQKRL | | |
| | | | | FPWKLHITQKDNYRVYNTMP | | |
| UROS | 7390 | 0188690 | P10746 | MKVLLLKDAKEDDCGQDPYIRE | Gunther | 164 |
| | | | | LGLYGLEATLIPVLSFEFLSLPSFS | Disease | |
| | | | | EKLSHPEDYGGLIFTSPRAVEAA | | |
| | | | | ELCLEQNNKTEVWERSLKEKWN | | |
| | | | | AKSVYVVGNATASLVSKIGLDT | | |
| | | | | EGETCGNAEKLAEYICSRESSAL | | |
| | | | | PLLFPCGNLKREILPKALKDKGIA | | |
| | | | | MESITVYQTVAHPGIQGNLNSYY | | |
| | | | | SQQGVPASITFFSPSGLTYSLKHI | | |
| | | | | QELSGDNIDQIKFAAIGPTTARAL | | |
| | | | | AAQGLPVSCTAESPTPQALATGI | | |
| | | | | RKALQPHGCC | | |
| TCIRG1 | 10312 | 0110719 | Q13488 | MGSMFRSEEVALVQLFLPTAAA | Malignant | 165 |
| | | | | YTCVSRLGELGLVEFRDLNASVS | Infantile | |
| | | | | AFQRRFVVDVRRCEELEKTFTFL | Osteoporosis | |
| | | | | QEEVRRAGLVLPPPKGRLPAPPP | | |
| | | | | RDLLRIQEETERLAQELRDVRGN | | |
| | | | | QQALRAQLHQLQLHAAVLRQG | | |
| | | | | HEPQLAAAHTDGASERTPLLQAP | | |
| | | | | GGPHQDLRVNFVAGAVEPHKAP | | |
| | | | | ALERLLWRACRGFLIASFRELEQ | | |
| | | | | PLEHPVTGEPATWMTFLISYWGE | | |
| | | | | QIGQKIRKITDCFHCHVFPFLQQE | | |
| | | | | EARLGALQQLQQQSQELQEVLG | | |
| | | | | ETERFLSQVLGRVLQLLPPGQVQ | | |
| | | | | VHKMKAVYLALNQCSVSTTHK | | |
| | | | | CLIAEAWCSVRDLPALQEALRDS | | |
| | | | | SMEEGVSAVAHRIPCRDMPPTLI | | |
| | | | | RTNRFTASFQGIVDAYGVGRYQ | | |
| | | | | EVNPAPYTIITFPFLFAVMFGDVG | | |
| | | | | HGLLMFLFALAMVLAENRPAVK | | |
| | | | | AAQNEIWQTFFRGRYLLLLMGL | | |
| | | | | FSIYTGFIYNECFSRATSIFPSGWS | | |
| | | | | VAAMANQSGWSDAFLAQHTML | | |
| | | | | TLDPNVTGVFLGPYPFGIDPIWSL | | |
| | | | | AANHLSFLNSFKMKMSVILGVV | | |
| | | | | HMAFGVVLGVFNHVHFGQRHR | | |
| | | | | LLLETLPELTFLLGLFGYLVFLVI | | |
| | | | | YKWLCVWAARAASAPSILIHFIN | | |
| | | | | MFLFSHSPSNRLLYPRQEVVQAT | | |
| | | | | LVVLALAMVPILLLGTPLHLLHR | | |
| | | | | HRRRLRRRPADRQEENKAGLLD | | |
| | | | | LPDASVNGWSSDEEKAGGLDDE | | |
| | | | | EEAELVPSEVLMHQAIHTIEFCL | | |
| | | | | GCVSNTASYLRLWALSLAHAQL | | |
| | | | | SEVLWAMVMRIGLGLGREVGV | | |
| | | | | AAVVLVPIFAAFAVMTVAILLV | | |
| | | | | MEGLSAFLHALRLHWVEFQNKF | | |
| | | | | YSGTGYKLSPFTFAATDD | | |
| CLCN7 | 1186 | 0103249 | P51798 | MANVSKKVSWSGRDRDDEEAA | Malignant | 166 |
| | | | | PLLRRTARPGGGTPLLNGAGPGA | Infantile | |
| | | | | ARQSPRSALFRVGHMSSVELDD | Osteoporosis | |
| | | | | ELLDPDMDPPHPFPKEIPHNEKL | | |
| | | | | LSLKYESLDYDNSENQLFLEEER | | |
| | | | | RINHTAFRTVEIKRWVICALIGIL | | |
| | | | | TGLVACFIDIVVENLAGLKYRVI | | |
| | | | | KGNIDKFTEKGGLSFSLLLWATL | | |
| | | | | NAAFVLVGSVIVAFIEPVAAGSGI | | |
| | | | | PQIKCFLNGVKIPHVVRLKTLVIK | | |
| | | | | VSGVILSVVGGLAVGKEGPMIHS | | |
| | | | | GSVIAAGISQGRSTSLKRDFKIFE | | |
| | | | | YFRRDTEKRDFVSAGAAAGVSA | | |
| | | | | AFGAPVGGVLFSLEEGASFWNQ | | |
| | | | | FLTWRIFFASMISTFTLNFVLSIY | | |
| | | | | HGNMWDLSSPGLINFGRFDSEK | | |
| | | | | MAYTIHEIPVFIAMGVVGGVLGA | | |
| | | | | VFNALNYWLTMFRIRYIHRPCLQ | | |
| | | | | VIEAVLVAAVTATVAFVLIYSSR | | |
| | | | | DCQPLQGGSMSYPLQLFCADGE | | |
| | | | | YNSMAAAFFNTPEKSVVSLFHDP | | |
| | | | | PGSYNPLTLGLFTLVYFFLACWT | | |
| | | | | YGLTVSAGVFIPSLLIGAAWGRL | | |
| | | | | FGISLSYLTGAAIWADPGKYALM | | |
| | | | | GAAAQLGGIVRMTLSLTVIMME | | |
| | | | | ATSNVTYGFPIMLVLMTAKIVGD | | |
| | | | | VFIEGLYDMHIQLQSVPFLHWEA | | |
| | | | | PVTSHSLTAREVMSTPVTCLRRR | | |
| | | | | EKVGVIVDVLSDTASNHNGFPV | | |
| | | | | VEHADDTQPARLQGLILRSQLIV | | |
| | | | | LLKHKVFVERSNLGLVQRRLRL | | |
| | | | | KDFRDAYPRFPPIQSIHVSQDERE | | |
| | | | | CTMDLSEFMNPSPYTVPQEASLP | | |
| | | | | RVFKLFRALGLRHLVVVDNRNQ | | |
| | | | | VVGLVTRKDLARYRLGKRGLEE | | |
| | | | | LSLAQT | | |
| MPL | 4352 | 0117400 | P40238 | MPSWALFMVTSCLLLAPQNLAQ | Congenital | 167 |
| | | | | VSSQDVSLLASDSEPLKCFSRTFE | Amegakaryocytic | |
| | | | | DLTCFWDEEEAAPSGTYQLLYA | Thrombocytopenia | |
| | | | | YPREKPRACPLSSQSMPHFGTRY | | |
| | | | | VCQFPDQEEVRLFFPLHLWVKN | | |
| | | | | VFLNQTRTQRVLFVDSVGLPAPP | | |
| | | | | SIIKAMGGSQPGELQISWEEPAPE | | |
| | | | | ISDFLRYELRYGPRDPKNSTGPT | | |
| | | | | VIQLIATETCCPALQRPHSASALD | | |
| | | | | QSPCAQPTMPWQDGPKQTSPSR | | |
| | | | | EASALTAEGGSCLISGLQPGNSY | | |
| | | | | WLQLRSEPDGISLGGSWGSWSLP | | |
| | | | | VTVDLPGDAVALGLQCFTLDLK | | |
| | | | | NVTCQWQQQDHASSQGFFYHSR | | |
| | | | | ARCCPRDRYPIWENCEEEEKTNP | | |
| | | | | GLQTPQFSRCHFKSRNDSIIHILV | | |
| | | | | EVTTAPGTVHSYLGSPFWIHQAV | | |
| | | | | RLPTPNLHWREISSGHLELEWQH | | |
| | | | | PSSWAAQETCYQLRYTGEGHQD | | |
| | | | | WKVLEPPLGARGGTLELRPRSR | | |
| | | | | YRLQLRARLNGPTYQGPWSSWS | | |
| | | | | DPTRVETATETAWISLVTALHLV | | |
| | | | | LGLSAVLGLLLLRWQFPAHYRR | | |
| | | | | LRHALWPSLPDLHRVLGQYLRD | | |
| | | | | TAALSPPKATVSDTCEEVEPSLL | | |
| | | | | EILPKSSERTPLPLCSSQAQMDYR | | |
| | | | | RLQPSCLGTMPLSVCPPMAESGS | | |
| | | | | CCTTHIANHSYLPLSYWQQP | | |
| ITGA2B | 3674 | 0005961 | P08514 | MARALCPLQALWLLEWVLLLLG | Glanzmann's | 168 |
| | | | | PCAAPPAWALNLDPVQLTFYAG | Thrombasthenia | |
| | | | | PNGSQFGFSLDFHKDSHGRVAIV | | |
| | | | | VGAPRTLGPSQEETGGVFLCPW | | |
| | | | | RAEGGQCPSLLFDLRDETRNVGS | | |
| | | | | QTLQTFKARQGLGASVVSWSDV | | |
| | | | | IVACAPWQHWNVLEKTEEAEKT | | |
| | | | | PVGSCFLAQPESGRRAEYSPCRG | | |
| | | | | NTLSRIYVENDFSWDKRYCEAG | | |
| | | | | FSSVVTQAGELVLGAPGGYYFL | | |
| | | | | GLLAQAPVADIFSSYRPGILLWH | | |
| | | | | VSSQSLSFDSSNPEYFDGYWGYS | | |
| | | | | VAVGEFDGDLNTTEYVVGAPTW | | |
| | | | | SWTLGAVEILDSYYQRLHRLRG | | |
| | | | | EQMASYFGHSVAVTDVNGDGR | | |
| | | | | HDLLVGAPLYMESRADRKLAEV | | |
| | | | | GRVYLFLQPRGPHALGAPSLLLT | | |
| | | | | GTQLYGRFGSAIAPLGDLDRDG | | |
| | | | | YNDIAVAAPYGGPSGRGQVLVF | | |
| | | | | LGQSEGLRSRPSQVLDSPFPTGS | | |
| | | | | AFGFSLRGAVDIDDNGYPDLIVG | | |
| | | | | AYGANQVAVYRAQPVVKASVQ | | |
| | | | | LLVQDSLNPAVKSCVLPQTKTPV | | |
| | | | | SCFNIQMCVGATGHNIPQKLSLN | | |
| | | | | AELQLDRQKPRQGRRVLLLGSQ | | |
| | | | | QAGTTLNLDLGGKHSPICHTTM | | |
| | | | | AFLRDEADFRDKLSPIVLSLNVS | | |
| | | | | LPPTEAGMAPAVVLHGDTHVQE | | |
| | | | | QTRIVLDCGEDDVCVPQLQLTAS | | |
| | | | | VTGSPLLVGADNVLELQMDAAN | | |
| | | | | EGEGAYEAELAVHLPQGAHYM | | |
| | | | | RALSNVEGFERLICNQKKENETR | | |
| | | | | VVLCELGNPMKKNAQIGIAMLV | | |
| | | | | SVGNLEEAGESVSFQLQIRSKNS | | |
| | | | | QNPNSKIVLLDVPVRAEAQVELR | | |
| | | | | GNSFPASLVVAAEEGEREQNSLD | | |
| | | | | SWGPKVEHTYELHNNGPGTVNG | | |
| | | | | LHLSIHLPGQSQPSDLLYILDIQP | | |
| | | | | QGGLQCFPQPPVNPLKVDWGLPI | | |
| | | | | PSPSPIHPAHHKRDRRQIFLPEPE | | |
| | | | | QPSRLQDPVLVSCDSAPCTVVQC | | |
| | | | | DLQEMARGQRAMVTVLAFLWL | | |
| | | | | PSLYQRPLDQFVLQSHAWFNVSS | | |
| | | | | LPYAVPPLSLPRGEAQVWTQLLR | | |
| | | | | ALEERAIPIWWVLVGVLGGLLLL | | |
| | | | | TILVLAMWKVGFFKRNRPPLEE | | |
| | | | | DDEEGE | | |
| ITGB3 | 3690 | 0259207 | P05106 | MRARPRPRPLWATVLALGALAG | Glanzmann's | 169 |
| | | | | VGVGGPNICTTRGVSSCQQCLA | Thrombasthenia | |
| | | | | VSPMCAWCSDEALPLGSPRCDL | | |
| | | | | KENLLKDNCAPESIEFPVSEARV | | |
| | | | | LEDRPLSDKGSGDSSQVTQVSPQ | | |
| | | | | RIALRLRPDDSKNFSIQVRQVED | | |
| | | | | YPVDIYYLMDLSYSMKDDLWSI | | |
| | | | | QNLGTKLATQMRKLTSNLRIGF | | |
| | | | | GAFVDKPVSPYMYISPPEALENP | | |
| | | | | CYDMKTTCLPMFGYKHVLTLTD | | |
| | | | | QVTRFNEEVKKQSVSRNRDAPE | | |
| | | | | GGFDAIMQATVCDEKIGWRNDA | | |
| | | | | SHLLVFTTDAKTHIALDGRLAGI | | |
| | | | | VQPNDGQCHVGSDNHYSASTTM | | |
| | | | | DYPSLGLMTEKLSQKNINLIFAV | | |
| | | | | TENVVNLYQNYSELIPGTTVGVL | | |
| | | | | SMDSSNVLQLIVDAYGKIRSKVE | | |
| | | | | LEVRDLPEELSLSFNATCLNNEVI | | |
| | | | | PGLKSCMGLKIGDTVSFSIEAKV | | |
| | | | | RGCPQEKEKSFTIKPVGFKDSLIV | | |
| | | | | QVTFDCDCACQAQAEPNSHRCN | | |
| | | | | NGNGTFECGVCRCGPGWLGSQC | | |
| | | | | ECSEEDYRPSQQDECSPREGQPV | | |
| | | | | CSQRGECLCGQCVCHSSDFGKIT | | |
| | | | | GKYCECDDFSCVRYKGEMCSGH | | |
| | | | | GQCSCGDCLCDSDWTGYYCNCT | | |
| | | | | TRTDTCMSSNGLLCSGRGKCEC | | |
| | | | | GSCVCIQPGSYGDTCEKCPTCPD | | |
| | | | | ACTFKKECVECKKFDRGALHDE | | |
| | | | | NTCNRYCRDEIESVKELKDTGK | | |
| | | | | DAVNCTYKNEDDCVVRFQYYE | | |
| | | | | DSSGKSILYVVEEPECPKGPDILV | | |
| | | | | VLLSVMGAILLIGLAALLIWKLLI | | |
| | | | | TIHDRKEFAKFEEERARAKWDT | | |
| | | | | ANNPLYKEATSTFTNITYRGT | | |
| ITGB2 | 3689 | 0160255 | P05107 | MLGLRPPLLALVGLLSLGCVLSQ | Leukocyte | 170 |
| | | | | ECTKFKVSSCRECIESGPGCTWC | Adhesion | |
| | | | | QKLNFTGPGDPDSIRCDTRPQLL | Deficiency | |
| | | | | MRGCAADDIMDPTSLAETQEDH | | |
| | | | | NGGQKQLSPQKVTLYLRPGQAA | | |
| | | | | AFNVTFRRAKGYPIDLYYLMDL | | |
| | | | | SYSMLDDLRNVKKLGGDLLRAL | | |
| | | | | NEITESGRIGFGSFVDKTVLPFVN | | |
| | | | | THPDKLRNPCPNKEKECQPPFAF | | |
| | | | | RHVLKLTNNSNQFQTEVGKQLIS | | |
| | | | | GNLDAPEGGLDAMMQVAACPE | | |
| | | | | EIGWRNVTRLLVFATDDGFHFA | | |
| | | | | GDGKLGAILTPNDGRCHLEDNL | | |
| | | | | YKRSNEFDYPSVGQLAHKLAEN | | |
| | | | | NIQPIFAVTSRMVKTYEKLTEIIP | | |
| | | | | KSAVGELSEDSSNVVQLIKNAYN | | |
| | | | | KLSSRVFLDHNALPDTLKVTYDS | | |
| | | | | FCSNGVTHRNQPRGDCDGVQIN | | |
| | | | | VPITFQVKVTATECIQEQSFVIRA | | |
| | | | | LGFTDIVTVQVLPQCECRCRDQS | | |
| | | | | RDRSLCHGKGFLECGICRCDTGY | | |
| | | | | IGKNCECQTQGRSSQELEGSCRK | | |
| | | | | DNNSIICSGLGDCVCGQCLCHTS | | |
| | | | | DVPGKLIYGQYCECDTINCERYN | | |
| | | | | GQVCGGPGRGLCFCGKCRCHPG | | |
| | | | | PEGSACQCERTTEGCLNPRRVEC | | |
| | | | | SGRGRCRCNVCECHSGYQLPLC | | |
| | | | | QECPGCPSPCGKYISCAECLKFE | | |
| | | | | KGPFGKNCSAACPGLQLSNNPV | | |
| | | | | KGRTCKERDSEGCWVAYTLEQQ | | |
| | | | | DGMDRYLIYVDESRECVAGPNI | | |
| | | | | AAIVGGTVAGIVLIGILLLVIWKA | | |
| | | | | LIHLSDLREYRRFEKEKLKSQWN | | |
| | | | | NDNPLFKSATTTVMNPKFAES | | |
| PKLR | 5313 | 0143627 | P30613 | MSIQENISSLQLRSWVSKSQRDL | Pyruvate | 171 |
| | | | | AKSILIGAPGGPAGYLRRASVAQ | Kinase | |
| | | | | LTQELGTAFFQQQQLPAAMADT | Deficiency | |
| | | | | FLEHLCLLDIDSEPVAARSTSIIAT | | |
| | | | | IGPASRSVERLKEMIKAGMNIAR | | |
| | | | | LNFSHGSHEYHAESIANVREAVE | | |
| | | | | SFAGSPLSYRPVAIALDTKGPEIR | | |
| | | | | TGILQGGPESEVELVKGSQVLVT | | |
| | | | | VDPAFRTRGNANTVWVDYPNIV | | |
| | | | | RVVPVGGRIYIDDGLISLVVQKIG | | |
| | | | | PEGLVTQVENGGVLGSRKGVNL | | |
| | | | | PGAQVDLPGLSEQDVRDLRFGV | | |
| | | | | EHGVDIVFASFVRKASDVAAVR | | |
| | | | | AALGPEGHGIKIISKIENHEGVKR | | |
| | | | | FDEILEVSDGIMVARGDLGIEIPA | | |
| | | | | EKVFLAQKMMIGRCNLAGKPVV | | |
| | | | | CATQMLESMITKPRPTRAETSDV | | |
| | | | | ANAVLDGADCIMLSGETAKGNF | | |
| | | | | PVEAVKMQHAIAREAEAAVYHR | | |
| | | | | QLFEELRRAAPLSRDPTEVTAIG | | |
| | | | | AVEAAFKCCAAAIIVLTTTGRSA | | |
| | | | | QLLSRYRPRAAVIAVTRSAQAAR | | |
| | | | | QVHLCRGVFPLLYREPPEAIWAD | | |
| | | | | DVDRRVQFGIESGKLRGFLRVG | | |
| | | | | DLVIVVTGWRPGSGYTNIMRVL | | |
| | | | | SIS | | |
| SLC25A38 | 54977 | 0144659 | Q96DW6 | MIQNSRPSLLQPQDVGDTVETL | Autosomal | 172 |
| | | | | MLHPVIKAFLCGSISGTCSTLLFQ | Recessive | |
| | | | | PLDLLKTRLQTLQPSDHGSRRVG | Sideroblastic | |
| | | | | MLAVLLKVVRTESLLGLWKGM | Anemia | |
| | | | | SPSIVRCVPGVGIYFGTLYSLKQY | | |
| | | | | FLRGHPPTALESVMLGVGSRSVA | | |
| | | | | GVCMSPITVIKTRYESGKYGYESI | | |
| | | | | YAALRSIYHSEGHRGLFSGLTAT | | |
| | | | | LLRDAPFSGIYLMFYNQTKNIVP | | |
| | | | | HDQVDATLIPITNFSCGIFAGILA | | |
| | | | | SLVTQPADVIKTHMQLYPLKFQ | | |
| | | | | WIGQAVTLIFKDYGLRGFFQGGI | | |
| | | | | PRALRRTLMAAMAWTVYEEMM | | |
| | | | | AKMGLKS | | |
| RAG1 | 5896 | 0166349 | P15918 | MAASFPPTLGLSSAPDEIQHPHIK | Rag 1 | 173 |
| | | | | FSEWKFKLFRVRSFEKTPEEAQK | Deficiency | |
| | | | | EKKDSFEGKPSLEQSPAVLDKAD | | |
| | | | | GQKPVPTQPLLKAHPKFSKKFHD | | |
| | | | | NEKARGKAIHQANLRHLCRICG | | |
| | | | | NSFRADEHNRRYPVHGPVDGKT | | |
| | | | | LGLLRKKEKRATSWPDLIAKVFR | | |
| | | | | IDVKADVDSIHPTEFCHNCWSIM | | |
| | | | | HRKFSSAPCEVYFPRNVTMEWH | | |
| | | | | PHTPSCDICNTARRGLKRKSLQP | | |
| | | | | NLQLSKKLKTVLDQARQARQHK | | |
| | | | | RRAQARISSKDVMKKIANCSKIH | | |
| | | | | LSTKLLAVDFPEHFVKSISCQICE | | |
| | | | | HILADPVETNCKHVFCRVCILRC | | |
| | | | | LKVMGSYCPSCRYPCFPTDLESP | | |
| | | | | VKSFLSVLNSLMVKCPAKECNE | | |
| | | | | EVSLEKYNHHISSHKESKEIFVHI | | |
| | | | | NKGGRPRQHLLSLTRRAQKHRL | | |
| | | | | RELKLQVKAFADKEEGGDVKSV | | |
| | | | | CMTLFLLALRARNEHRQADELE | | |
| | | | | AIMQGKGSGLQPAVCLAIRVNTF | | |
| | | | | LSCSQYHKMYRTVKAITGRQIFQ | | |
| | | | | PLHALRNAEKVLLPGYHHFEWQ | | |
| | | | | PPLKNVSSSTDVGIIDGLSGLSSS | | |
| | | | | VDDYPVDTIAKRFRYDSALVSAL | | |
| | | | | MDMEEDILEGMRSQDLDDYLNG | | |
| | | | | PFTVVVKESCDGMGDVSEKHGS | | |
| | | | | GPVVPEKAVRFSFTIMKITIAHSS | | |
| | | | | QNVKVFEEAKPNSELCCKPLCL | | |
| | | | | MLADESDHETLTAILSPLIAEREA | | |
| | | | | MKSSELMLELGGILRTFKFIFRGT | | |
| | | | | GYDEKLVREVEGLEASGSVYICT | | |
| | | | | LCDATRLEASQNLVFHSITRSHA | | |
| | | | | ENLERYEVWRSNPYHESVEELR | | |
| | | | | DRVKGVSAKPFIETVPSIDALHC | | |
| | | | | DIGNAAEFYKIFQLEIGEVYKNP | | |
| | | | | NASKEERKRWQATLDKHLRKK | | |
| | | | | MNLKPIMRMNGNFARKLMTKE | | |
| | | | | TVDAVCELIPSEERHEALRELMD | | |
| | | | | LYLKMKPVWRSSCPAKECPESL | | |
| | | | | CQYSFNSQRFAELLSTKFKYRYE | | |
| | | | | GKITNYFHKTLAHVPEIIERDGSI | | |
| | | | | GAWASEGNESGNKLFRRFRKMN | | |
| | | | | ARQSKCYEMEDVLKHHWLYTS | | |
| | | | | KYLQKFMNAHNALKTSGFTMNP | | |
| | | | | QASLGDPLGIEDSLESQDSMEF | | |
| RAG2 | 5897 | 0175097 | P55895 | MSLQMVTVSNNIALIQPGFSLMN | Rag 2 | 174 |
| | | | | FDGQVFFFGQKGWPKRSCPTGV | Deficiency | |
| | | | | FHLDVKHNHVKLKPTIFSKDSCY | | |
| | | | | LPPLRYPATCTFKGSLESEKHQYI | | |
| | | | | IHGGKTPNNEVSDKIYVMSIVCK | | |
| | | | | NNKKVTFRCTEKDLVGDVPEAR | | |
| | | | | YGHSINVVYSRGKSMGVLFGGR | | |
| | | | | SYMPSTHRTTEKWNSVADCLPC | | |
| | | | | VFLVDFEFGCATSYILPELQDGLS | | |
| | | | | FHVSIAKNDTIYILGGHSLANNIR | | |
| | | | | PANLYRIRVDLPLGSPAVNCTVL | | |
| | | | | PGGISVSSAILTQTNNDEFVIVGG | | |
| | | | | YQLENQKRMICNIISLEDNKIEIR | | |
| | | | | EMETPDWTPDIKHSKIWFGSNM | | |
| | | | | GNGTVFLGIPGDNKQVVSEGFYF | | |
| | | | | YMLKCAEDDTNEEQTTFTNSQT | | |
| | | | | STEDPGDSTPFEDSEEFCFSAEAN | | |
| | | | | SFDGDDEFDTYNEDDEEDESETG | | |
| | | | | YWITCCPTCDVDINTWVPFYSTE | | |
| | | | | LNKPAMIYCSHGDGHWVHAQC | | |
| | | | | MDLAERTLIHLSAGSNKYYCNE | | |
| | | | | HVEIARALHTPQRVLPLKKPPMK | | |
| | | | | SLRKKGSGKILTPAKKSFLRRLF | | |
| | | | | D | | |
| FANCA | 2175 | 0187741 | O15360 | MSDSWVPNSASGQDPGGRRRA | Fanconi | 175 |
| | | | | WAELLAGRVKREKYNPERAQKL | Anemia | |
| | | | | KESAVRLLRSHQDLNALLLEVE | | |
| | | | | GPLCKKLSLSKVIDCDSSEAYAN | | |
| | | | | HSSSFIGSALQDQASRLGVPVGIL | | |
| | | | | SAGMVASSVGQICTAPAETSHPV | | |
| | | | | LLTVEQRKKLSSLLEFAQYLLAH | | |
| | | | | SMFSRLSFCQELWKIQSSLLLEA | | |
| | | | | VWHLHVQGIVSLQELLESHPDM | | |
| | | | | HAVGSWLFRNLCCLCEQMEASC | | |
| | | | | QHADVARAMLSDFVQMFVLRG | | |
| | | | | FQKNSDLRRTVEPEKMPQVTVD | | |
| | | | | VLQRMLIFALDALAAGVQEESST | | |
| | | | | HKIVRCWFGVFSGHTLGSVISTD | | |
| | | | | PLKRFFSHTLTQILTHSPVLKASD | | |
| | | | | AVQMQREWSFARTHPLLTSLYR | | |
| | | | | RLFVMLSAEELVGHLQEVLETQ | | |
| | | | | EVHWQRVLSFVSALVVCFPEAQ | | |
| | | | | QLLEDWVARLMAQAFESCQLDS | | |
| | | | | MVTAFLVVRQAALEGPSAFLSY | | |
| | | | | ADWFKASFGSTRGYHGCSKKAL | | |
| | | | | VFLFTFLSELVPFESPRYLQVHIL | | |
| | | | | HPPLVPGKYRSLLTDYISLAKTR | | |
| | | | | LADLKVSIENMGLYEDLSSAGDI | | |
| | | | | TEPHSQALQDVEKAIMVFEHTG | | |
| | | | | NIPVTVMEASIFRRPYYVSHFLPA | | |
| | | | | LLTPRVLPKVPDSRVAFIESLKRA | | |
| | | | | DKIPPSLYSTYCQACSAAEEKPE | | |
| | | | | DAALGVRAEPNSAEEPLGQLTA | | |
| | | | | ALGELRASMTDPSQRDVISAQV | | |
| | | | | AVISERLRAVLGHNEDDSSVEIS | | |
| | | | | KIQLSINTPRLEPREHMAVDLLLT | | |
| | | | | SFCQNLMAASSVAPPERQGPWA | | |
| | | | | ALFVRTMCGRVLPAVLTRLCQL | | |
| | | | | LRHQGPSLSAPHVLGLAALAVH | | |
| | | | | LGESRSALPEVDVGPPAPGAGLP | | |
| | | | | VPALFDSLLTCRTRDSLFFCLKFC | | |
| | | | | TAAISYSLCKFSSQSRDTLCSCLS | | |
| | | | | PGLIKKFQFLMFRLFSEARQPLSE | | |
| | | | | EDVASLSWRPLHLPSADWQRAA | | |
| | | | | LSLWTHRTFREVLKEEDVHLTY | | |
| | | | | QDWLHLELEIQPEADALSDTERQ | | |
| | | | | DFHQWAIHEHFLPESSASGGCDG | | |
| | | | | DLQAACTILVNALMDFHQSSRS | | |
| | | | | YDHSENSDLVFGGRTGNEDIISR | | |
| | | | | LQEMVADLELQQDLIVPLGHTPS | | |
| | | | | QEHFLFEIFRRRLQALTSGWSVA | | |
| | | | | ASLQRQRELLMYKRILLRLPSSV | | |
| | | | | LCGSSFQAEQPITARCEQFFHLV | | |
| | | | | NSEMRNFCSHGGALTQDITAHFF | | |
| | | | | RGLLNACLRSRDPSLMVDFILAK | | |
| | | | | CQTKCPLILTSALVWWPSLEPVL | | |
| | | | | LCRWRRHCQSPLPRELQKLQEG | | |
| | | | | RQFASDFLSPEAASPAPNPDWLS | | |
| | | | | AAALHFAIQQVREENIRKQLKKL | | |
| | | | | DCEREELLVFLFFFSLMGLLSSHL | | |
| | | | | TSNSTTDLPKAFHVCAAILECLE | | |
| | | | | KRKISWLALFQLTESDLRLGRLL | | |
| | | | | LRVAPDQHTRLLPFAFYSLLSYF | | |
| | | | | HEDAAIREEAFLHVAVDMYLKL | | |
| | | | | VQLFVAGDTSTVSPPAGRSLELK | | |
| | | | | GQGNPVELITKARLFLLQLIPRCP | | |
| | | | | KKSFSHVAELLADRGDCDPEVS | | |
| | | | | AALQSRQQAAPDADLSQEPHLF | | |
| FANCC | 2176 | 0158169 | Q00597 | MAQDSVDLSCDYQFWMQKLSV | Fanconi | 176 |
| | | | | WDQASTLETQQDTCLHVAQFQE | Anemia | |
| | | | | FLRKMYEALKEMDSNTVIERFPT | | |
| | | | | IGQLLAKACWNPFILAYDESQKI | | |
| | | | | LIWCLCCLINKEPQNSGQSKLNS | | |
| | | | | WIQGVLSHILSALRFDKEVALFT | | |
| | | | | QGLGYAPIDYYPGLLKNMVLSL | | |
| | | | | ASELRENHLNGFNTQRRMAPER | | |
| | | | | VASLSRVCVPLITLTDVDPLVEA | | |
| | | | | LLICHGREPQEILQPEFFEAVNEA | | |
| | | | | ILLKKISLPMSAVVCLWLRHLPS | | |
| | | | | LEKAMLHLFEKLISSERNCLRRIE | | |
| | | | | CFIKDSSLPQAACHPAIFRVVDE | | |
| | | | | MFRCALLETDGALEIIATIQVFTQ | | |
| | | | | CFVEALEKASKQLRFALKTYFPY | | |
| | | | | TSPSLAMVLLQDPQDIPRGHWL | | |
| | | | | QTLKHISELLREAVEDQTHGSCG | | |
| | | | | GPFESWFLFIHFGGWAEMVAEQ | | |
| | | | | LLMSAAEPPTALLWLLAFYYGP | | |
| | | | | RDGRQQRAQTMVQVKAVLGHL | | |
| | | | | LAMSRSSSLSAQDLQTVAGQGT | | |
| | | | | DTDLRAPAQQLIRHLLLNFLLWA | | |
| | | | | PGGHTIAWDVITLMAHTAEITHE | | |
| | | | | IIGFLDQTLYRWNRLGIESPRSEK | | |
| | | | | LARELLKELRTQV | | |
| FANCG | 2189 | 0221829 | O15287 | MSRQTTSVGSSCLDLWREKNDR | Fanconi | 177 |
| | | | | LVRQAKVAQNSGLTLRRQQLAQ | Anemia | |
| | | | | DALEGLRGLLHSLQGLPAAVPV | | |
| | | | | LPLELTVTCNFIILRASLAQGFTE | | |
| | | | | DQAQDIQRSLERVLETQEQQGPR | | |
| | | | | LEQGLRELWDSVLRASCLLPELL | | |
| | | | | SALHRLVGLQAALWLSADRLGD | | |
| | | | | LALLLETLNGSQSGASKDLLLLL | | |
| | | | | KTWSPPAEELDAPLTLQDAQGL | | |
| | | | | KDVLLTAFAYRQGLQELITGNPD | | |
| | | | | KALSSLHEAASGLCPRPVLVQVY | | |
| | | | | TALGSCHRKMGNPQRALLYLVA | | |
| | | | | ALKEGSAWGPPLLEASRLYQQL | | |
| | | | | GDTTAELESLELLVEALNVPCSS | | |
| | | | | KAPQFLIEVELLLPPPDLASPLHC | | |
| | | | | GTQSQTKHILASRCLQTGRAGD | | |
| | | | | AAEHYLDLLALLLDSSEPRFSPPP | | |
| | | | | SPPGPCMPEVFLEAAVALIQAGR | | |
| | | | | AQDALTLCEELLSRTSSLLPKMS | | |
| | | | | RLWEDARKGTKELPYCPLWVSA | | |
| | | | | THLLQGQAWVQLGAQKVAISEF | | |
| | | | | SRCLELLFRATPEEKEQGAAFNC | | |
| | | | | EQGCKSDAALQQLRAAALISRG | | |
| | | | | LEWVASGQDTKALQDFLLSVQM | | |
| | | | | CPGNRDTYFHLLQTLKRLDRRD | | |
| | | | | EATALWWRLEAQTKGSHEDAL | | |
| | | | | WSLPLYLESYLSWIRPSDRDAFL | | |
| | | | | EEFRTSLPKSCDL | | |
| ABCD1 | 215 | 0101986 | P33897 | MPVLSRPRPWRGNTLKRTAVLL | X-Linked | 178 |
| | | | | ALAAYGAHKVYPLVRQCLAPAR | Adrenoleukodystrophy | |
| | | | | GLQAPAGEPTQEASGVAAAKAG | | |
| | | | | MNRVFLQRLLWLLRLLFPRVLC | | |
| | | | | RETGLLALHSAALVSRTFLSVYV | | |
| | | | | ARLDGRLARCIVRKDPRAFGWQ | | |
| | | | | LLQWLLIALPATFVNSAIRYLEG | | |
| | | | | QLALSFRSRLVAHAYRLYFSQQT | | |
| | | | | YYRVSNMDGRLRNPDQSLTEDV | | |
| | | | | VAFAASVAHLYSNLTKPLLDVA | | |
| | | | | VTSYTLLRAARSRGAGTAWPSAI | | |
| | | | | AGLVVFLTANVLRAFSPKFGELV | | |
| | | | | AEEARRKGELRYMHSRVVANSE | | |
| | | | | EIAFYGGHEVELALLQRSYQDLA | | |
| | | | | SQINLILLERLWYVMLEQFLMKY | | |
| | | | | VWSASGLLMVAVPIITATGYSES | | |
| | | | | DAEAVKKAALEKKEEELVSERT | | |
| | | | | EAFTIARNLLTAAADAIERIMSSY | | |
| | | | | KEVTELAGYTARVHEMFQVFED | | |
| | | | | VQRCHFKRPRELEDAQAGSGTIG | | |
| | | | | RSGVRVEGPLKIRGQVVDVEQGI | | |
| | | | | ICENIPIVTPSGEVVVASLNIRVEE | | |
| | | | | GMHLLITGPNGCGKSSLFRILGG | | |
| | | | | LWPTYGGVLYKPPPQRMFYIPQ | | |
| | | | | RPYMSVGSLRDQVIYPDSVEDM | | |
| | | | | QRKGYSEQDLEAILDVVHLHHIL | | |
| | | | | QREGGWEAMCDWKDVLSGGEK | | |
| | | | | QRIGMARMFYHRPKYALLDECT | | |
| | | | | SAVSIDVEGKIFQAAKDAGIALL | | |
| | | | | SITHRPSLWKYHTHLLQFDGEGG | | |
| | | | | WKFEKLDSAARLSLTEEKQRLE | | |
| | | | | QQLAGIPKMQRRLQELCQILGEA | | |
| | | | | VAPAHVPAPSPQGPGGLQGAST | | |

[0656] In some embodiments, the exogenous agent comprises a protein of Table 6 below. In some embodiments, the exogenous agent comprises the wild-type human sequence of any of the proteins of Table 6, a functional fragment thereof (e.g., an enzymatically active fragment thereof), or a functional variant thereof. In some embodiments, the exogenous agent comprises an amino acid sequence having at least 70%, 75%, 80%, 85%, 90%, 95%, 96%, 97%, 98%, or 99%, identity to an amino acid sequence of Table 6, e.g., a Uniprot Protein Accession Number sequence of column 4 of Table 6 or an amino acid sequence of column 5 of Table 6. In some embodiments, the payload gene encodes an amino acid sequence having at least 70%, 75%, 80%, 85%, 90%, 95%, 96%, 97%, 98%, or 99%, identity to an amino acid sequence of Table 6. In some embodiments, the payload gene has a nucleic acid sequence having at least 70%, 75%, 80%, 85%, 90%, 95%, 96%, 97%, 98%, or 99%, identity to a nucleic acid sequence of Table 6, e.g., an Ensemble Gene Accession Number of column 3 of Table 6.

[0657] In some embodiments, the exogenous agent comprises the wild-type human sequence set forth in any of SEQ ID NOSs: 179-208, a functional fragment thereof (e.g., an enzymatically active fragment thereof), or a functional variant thereof. In some embodiments, the exogenous agent comprises an amino acid sequence having at least 70%, 75%, 80%, 85%, 90%, 95%, 96%, 97%, 98%, or 99%, identity to an amino acid sequence set forth in any of SEQ ID Nos: 179-208. In some embodiments, the payload gene has a nucleic acid sequence having at least 70%, 75%, 80%, 85%, 90%, 95%, 96%, 97%, 98%, or 99%, identity to a nucleic acid sequence of encoding any of the sequence set forth in any of SEQ ID NOS: 179-208.

TABLE 6
Lysosomal storage diseases or disorders. The first column lists exogenous
agents that can be delivered to treat the indications in the sixth column,
according to the methods and uses herein. Each Uniprot accession number of
Table 6 is herein incorporated by reference in its entirety.

| | | Ensembl | | | | |
|---|---|---|---|---|---|---|
| | | Gene(s) | | | | |
| | | Accession | | | | |
| | | Number | Uniprot | | | |
| | Entrez | (ENSG0000+ | Protein(s) | | | |
| | Accession | number | Accession | Amino Acid Sequence (first | Disease/ | SEQ |
| Gene | Number | shown) | Number | Uniprot Accession Number) | Disorder | ID NO |
| MAN2B1 | 4125 | 0104774 | O00754 | MGAYARASGVCARGCLDSAG | Alpha- | 179 |
| | | | | PWTMSRALRPPLPPLCFFLLLL | mannosidosis | |
| | | | | AAAGARAGGYETCPTVQPNM | | |
| | | | | LNVHLLPHTHDDVGWLKTVD | | |
| | | | | QYFYGIKNDIQHAGVQYILDS | | |
| | | | | VISALLADPTRRFIYVEIAFFSR | | |
| | | | | WWHQQTNATQEVVRDLVRQ | | |
| | | | | GRLEFANGGWVMNDEAATHY | | |
| | | | | GAIVDQMTLGLRFLEDTFGND | | |
| | | | | GRPRVAWHIDPFGHSREQASL | | |
| | | | | FAQMGFDGFFFGRLDYQDKW | | |
| | | | | VRMQKLEMEQVWRASTSLKP | | |
| | | | | PTADLFTGVLPNGYNPPRNLC | | |
| | | | | WDVLCVDQPLVEDPRSPEYNA | | |
| | | | | KELVDYFLNVATAQGRYYRT | | |
| | | | | NHTVMTMGSDFQYENANMW | | |
| | | | | FKNLDKLIRLVNAQQAKGSSV | | |
| | | | | HVLYSTPACYLWELNKANLT | | |
| | | | | WSVKHDDFFPYADGPHQFWT | | |
| | | | | GYFSSRPALKRYERLSYNFLQ | | |
| | | | | VCNQLEALVGLAANVGPYGS | | |
| | | | | GDSAPLNEAMAVLQHHDAVS | | |
| | | | | GTSRQHVANDYARQLAAGWG | | |
| | | | | PCEVLLSNALARLRGFKDHFT | | |
| | | | | FCQQLNISICPLSQTAARFQVIV | | |
| | | | | YNPLGRKVNWMVRLPVSEGV | | |
| | | | | FVVKDPNGRTVPSDVVIFPSSD | | |
| | | | | SQAHPPELLFSASLPALGFSTY | | |
| | | | | SVAQVPRWKPQARAPQPIPRR | | |
| | | | | SWSPALTIENEHIRATFDPDTG | | |
| | | | | LLMEIMNMNQQLLLPVRQTFF | | |
| | | | | WYNASIGDNESDQASGAYIFR | | |
| | | | | PNQQKPLPVSRWAQIHLVKTP | | |
| | | | | LVQEVHQNFSAWCSQVVRLY | | |
| | | | | PGQRHLELEWSVGPIPVGDTW | | |
| | | | | GKEVISRFDTPLETKGRFYTDS | | |
| | | | | NGREILERRRDYRPTWKLNQT | | |
| | | | | EPVAGNYYPVNTRIYITDGNM | | |
| | | | | QLTVLTDRSQGGSSLRDGSLE | | |
| | | | | LMVHRRLLKDDGRGVSEPLM | | |
| | | | | ENGSGAWVRGRHLVLLDTAQ | | |
| | | | | AAAAGHRLLAEQEVLAPQVV | | |
| | | | | LAPGGGAAYNLGAPPRTQFSG | | |
| | | | | LRRDLPPSVHLLTLASWGPEM | | |
| | | | | VLLRLEHQFAVGEDSGRNLSA | | |
| | | | | PVTLNLRDLFSTFTITRLQETTL | | |
| | | | | VANQLREAASRLKWTTNTGPT | | |
| | | | | PHQTPYQLDPANITLEPMEIRT | | |
| | | | | FLASVQWKEVDG | | |
| AGA | 175 | 0038002 | P20933 | MARKSNLPVLLVPFLLCQALV | Aspartylgucosaminuria | 180 |
| | | | | RCSSPLPLVVNTWPFKNATEA | | |
| | | | | AWRALASGGSALDAVESGCA | | |
| | | | | MCEREQCDGSVGFGGSPDELG | | |
| | | | | ETTLDAMIMDGTTMDVGAVG | | |
| | | | | DLRRIKNAIGVARKVLEHTTH | | |
| | | | | TLLVGESATTFAQSMGFINEDL | | |
| | | | | STTASQALHSDWLARNCQPNY | | |
| | | | | WRNVIPDPSKYCGPYKPPGILK | | |
| | | | | QDIPIHKETEDDRGHDTIGMV | | |
| | | | | VIHKTGHIAAGTSTNGIKFKIH | | |
| | | | | GRVGDSPIPGAGAYADDTAGA | | |
| | | | | AAATGNGDILMRFLPSYQAVE | | |
| | | | | YMRRGEDPTIACQKVISRIQKH | | |
| | | | | FPEFFGAVICANVTGSYGAAC | | |
| | | | | NKLSTFTQFSFMVYNSEKNQP | | |
| | | | | TEEKVDCI | | |
| LYST | 1130 | 0143669 | Q99698 | MSTDSNSLAREFLTDVNRLCN | Chediak- | 181 |
| | | | | AVVQRVEAREEEEEETHMATL | Higashi | |
| | | | | GQYLVHGRGFLLLTKLNSIIDQ | Syndrome | |
| | | | | ALTCREELLTLLLSLLPLVWKI | | |
| | | | | PVQEEKATDFNLPLSADIILTK | | |
| | | | | EKNSSSQRSTQEKLHLEGSALS | | |
| | | | | SQVSAKVNVFRKSRRQRKITH | | |
| | | | | RYSVRDARKTQLSTSDSEANS | | |
| | | | | DEKGIAMNKHRRPHLLHHFLT | | |
| | | | | SFPKQDHPKAKLDRLATKEQT | | |
| | | | | PPDAMALENSREIIPRQGSNTD | | |
| | | | | ILSEPAALSVISNMNNSPFDLC | | |
| | | | | HVLLSLLEKVCKFDVTLNHNS | | |
| | | | | PLAASVVPTLTEFLAGFGDCCS | | |
| | | | | LSDNLESRVVSAGWTEEPVAL | | |
| | | | | IQRMLFRTVLHLLSVDVSTAE | | |
| | | | | MMPENLRKNLTELLRAALKIR | | |
| | | | | ICLEKQPDPFAPRQKKTLQEVQ | | |
| | | | | EDFVFSKYRHRALLLPELLEG | | |
| | | | | VLQILICCLQSAASNPFYFSQA | | |
| | | | | MDLVQEFIQHHGFNLFETAVL | | |
| | | | | QMEWLVLRDGVPPEASEHLK | | |
| | | | | ALINSVMKIMSTVKKVKSEQL | | |
| | | | | HHSMCTRKRHRRCEYSHFMH | | |
| | | | | HHRDLSGLLVSAFKNQVSKNP | | |
| | | | | PEETADGDVYYPERCCCIAVC | | |
| | | | | AHQCLRLLQQASLSSTCVQILS | | |
| | | | | GVHNIGICCCMDPKSVIIPLLH | | |
| | | | | AFKLPALKNFQQHILNILNKLI | | |
| | | | | LDQLGGAEISPKIKKAACNICT | | |
| | | | | VDSDQLAQLEETLQGNLCDAE | | |
| | | | | LSSSLSSPSYRFQGILPSSGSED | | |
| | | | | LLWKWDALKAYQNFVFEEDR | | |
| | | | | LHSIQIANHICNLIQKGNIVVQ | | |
| | | | | WKLYNYIFNPVLQRGVELAHH | | |
| | | | | CQHLSVTSAQSHVCSHHNQCL | | |
| | | | | PQDVLQIYVKTLPILLKSRVIR | | |
| | | | | DLFLSCNGVSQIIELNCLNGIRS | | |
| | | | | HSLKAFETLIISLGEQQKDASV | | |
| | | | | PDIDGIDIEQKELSSVHVGTSFH | | |
| | | | | HQQAYSDSPQSLSKFYAGLKE | | |
| | | | | AYPKRRKTVNQDVHINTINLF | | |
| | | | | LCVAFLCVSKEAESDRESAND | | |
| | | | | SEDTSGYDSTASEPLSHMLPCI | | |
| | | | | SLESLVLPSPEHMHQAADIWS | | |
| | | | | MCRWIYMLSSVFQKQFYRLG | | |
| | | | | GFRVCHKLIFMIIQKLFRSHKE | | |
| | | | | EQGKKEGDTSVNENQDLNRIS | | |
| | | | | QPKRTMKEDLLSLAIKSDPIPS | | |
| | | | | ELGSLKKSADSLGKLELQHISS | | |
| | | | | INVEEVSATEAAPEEAKLFTSQ | | |
| | | | | ESETSLQSIRLLEALLAICLHGA | | |
| | | | | RTSQQKMELELPNQNLSVESIL | | |
| | | | | FEMRDHLSQSKVIETQLAKPLF | | |
| | | | | DALLRVALGNYSADFEHNDA | | |
| | | | | MTEKSHQSAEELSSQPGDFSEE | | |
| | | | | AEDSQCCSFKLLVEEEGYEAD | | |
| | | | | SESNPEDGETQDDGVDLKSET | | |
| | | | | EGFSASSSPNDLLENLTQGEIIY | | |
| | | | | PEICMLELNLLSASKAKLDVL | | |
| | | | | AHVFESFLKIIRQKEKNVFLLM | | |
| | | | | QQGTVKNLLGGFLSILTQDDS | | |
| | | | | DFQACQRVLVDLLVSLMSSRT | | |
| | | | | CSEELTLLLRIFLEKSPCTKILL | | |
| | | | | LGILKIIESDTTMSPSQYLTFPL | | |
| | | | | LHAPNLSNGVSSQKYPGILNSK | | |
| | | | | AMGLLRRARVSRSKKEADRES | | |
| | | | | FPHRLLSSWHIAPVHLPLLGQN | | |
| | | | | CWPHLSEGFSVSLWFNVECIH | | |
| | | | | EAESTTEKGKKIKKRNKSLILP | | |
| | | | | DSSFDGTESDRPEGAEYINPGE | | |
| | | | | RLIEEGCIHIISLGSKALMIQVW | | |
| | | | | ADPHNATLIFRVCMDSNDDM | | |
| | | | | KAVLLAQVESQENIFLPSKWQ | | |
| | | | | HLVLTYLQQPQGKRRIHGKISI | | |
| | | | | WVSGQRKPDVTLDFMLPRKTS | | |
| | | | | LSSDSNKTFCMIGHCLSSQEEF | | |
| | | | | LQLAGKWDLGNLLLFNGAKV | | |
| | | | | GSQEAFYLYACGPNHTSVMPC | | |
| | | | | KYGKPVNDYSKYINKEILRCE | | |
| | | | | QIRELFMTKKDVDIGLLIESLS | | |
| | | | | VVYTTYCPAQYTIYEPVIRLKG | | |
| | | | | QMKTQLSQRPFSSKEVQSILLE | | |
| | | | | PHHLKNLQPTEYKTIQGILHEI | | |
| | | | | GGTGIFVFLFARVVELSSCEET | | |
| | | | | QALALRVILSLIKYNQQRVHEL | | |
| | | | | ENCNGLSMIHQVLIKQKCIVGF | | |
| | | | | YILKTLLEGCCGEDIIYMNENG | | |
| | | | | EFKLDVDSNAIIQDVKLLEELL | | |
| | | | | LDWKIWSKAEQGVWETLLAA | | |
| | | | | LEVLIRADHHQQMFNIKQLLK | | |
| | | | | AQVVHHFLLTCQVLQEYKEG | | |
| | | | | QLTPMPREVCRSFVKIIAEVLG | | |
| | | | | SPPDLELLTIIFNFLLAVHPPTN | | |
| | | | | TYVCHNPTNFYFSLHIDGKIFQ | | |
| | | | | EKVRSIMYLRHSSSGGRSLMSP | | |
| | | | | GFMVISPSGFTASPYEGENSSNI | | |
| | | | | IPQQMAAHMLRSRSLPAFPTSS | | |
| | | | | LLTQSQKLTGSLGCSIDRLQNI | | |
| | | | | ADTYVATQSKKQNSLGSSDTL | | |
| | | | | KKGKEDAFISSCESAKTVCEM | | |
| | | | | EAVLSAQVSVSDVPKGVLGFP | | |
| | | | | VVKADHKQLGAEPRSEDDSPG | | |
| | | | | DESCPRRPDYLKGLASFQRSHS | | |
| | | | | TIASLGLAFPSQNGSAAVGRW | | |
| | | | | PSLVDRNTDDWENFAYSLGYE | | |
| | | | | PNYNRTASAHSVTEDCLVPICC | | |
| | | | | GLYELLSGVLLILPDVLLEDV | | |
| | | | | MDKLIQADTLLVLVNHPSPAI | | |
| | | | | QQGVIKLLDAYFARASKEQKD | | |
| | | | | KFLKNRGFSLLANQLYLHRGT | | |
| | | | | QELLECFIEMFFGRHIGLDEEF | | |
| | | | | DLEDVRNMGLFQKWSVIPILG | | |
| | | | | LIETSLYDNILLHNALLLLLQIL | | |
| | | | | NSCSKVADMLLDNGLLYVLC | | |
| | | | | NTVAALNGLEKNIPMSEYKLL | | |
| | | | | ACDIQQLFIAVTIHACSSSGSQ | | |
| | | | | YFRVIEDLIVMLGYLQNSKNK | | |
| | | | | RTQNMAVALQLRVLQAAMEF | | |
| | | | | IRTTANHDSENLTDSLQSPSAP | | |
| | | | | HHAVVQKRKSIAGPRKFPLAQ | | |
| | | | | TESLLMKMRSVANDELHVMM | | |
| | | | | QRRMSQENPSQATETELAQRL | | |
| | | | | QRLTVLAVNRIIYQEFNSDIIDI | | |
| | | | | LRTPENVTQSKTSVFQTEISEE | | |
| | | | | NIHHEQSSVFNPFQKEIFTYLV | | |
| | | | | EGFKVSIGSSKASGSKQQWTKI | | |
| | | | | LWSCKETFRMQLGRLLVHILS | | |
| | | | | PAHAAQERKQIFEIVHEPNHQE | | |
| | | | | ILRDCLSPSLQHGAKLVLYLSE | | |
| | | | | LIHNHQGELTEEELGTAELLM | | |
| | | | | NALKLCGHKCIPPSASTKADLI | | |
| | | | | KMIKEEQKKYETEEGVNKAA | | |
| | | | | WQKTVNNNQQSLFQRLDSKS | | |
| | | | | KDISKIAADITQAVSLSQGNER | | |
| | | | | KKVIQHIRGMYKVDLSASRH | | |
| | | | | WQELIQQLTHDRAVWYDPIYY | | |
| | | | | PTSWQLDPTEGPNRERRRLQR | | |
| | | | | CYLTIPNKYLLRDRQKSEDVV | | |
| | | | | KPPLSYLFEDKTHSSFSSTVKD | | |
| | | | | KAASESIRVNRRCISVAPSRET | | |
| | | | | AGELLLGKCGMYFVEDNASD | | |
| | | | | TVESSSLQGELEPASFSWTYEE | | |
| | | | | IKEVHKRWWQLRDNAVEIFLT | | |
| | | | | NGRTLLLAFDNTKVRDDVYH | | |
| | | | | NILTNNLPNLLEYGNITALTNL | | |
| | | | | WYTGQITNFEYLTHLNKHAGR | | |
| | | | | SFNDLMQYPVFPFILADYVSET | | |
| | | | | LDLNDLLIYRNLSKPIAVQYKE | | |
| | | | | KEDRYVDTYKYLEEEYRKGA | | |
| | | | | REDDPMPPVQPYHYGSHYSNS | | |
| | | | | GTVLHFLVRMPPFTKMFLAYQ | | |
| | | | | DQSFDIPDRTFHSTNTTWRLSS | | |
| | | | | PESMTDVKELIPEFFYLPEFLV | | |
| | | | | NREGFDFGVRQNGERVNHVN | | |
| | | | | LPPWARNDPRLFILIHRQALES | | |
| | | | | DYVSQNICQWIDLVFGYKQKG | | |
| | | | | KASVQAINVFHPATYFGMDVS | | |
| | | | | AVEDPVQRRALETMIKTYGQT | | |
| | | | | PRQLFHMAHVSRPGAKLNIEG | | |
| | | | | ELPAAVGLLVQFAFRETREQV | | |
| | | | | KEITYPSPLSWIKGLKWGEYV | | |
| | | | | GSPSAPVPVVCFSQPHGERFGS | | |
| | | | | LQALPTRAICGLSRNFCLLMTY | | |
| | | | | SKEQGVRSMNSTDIQWSAILS | | |
| | | | | WGYADNILRLKSKQSEPPVNFI | | |
| | | | | QSSQQYQVTSCAWVPDSCQLF | | |
| | | | | TGSKCGVITAYTNRFTSSTPSEI | | |
| | | | | EMETQIHLYGHTEEITSLFVCK | | |
| | | | | PYSILISVSRDGTCIIWDLNRLC | | |
| | | | | YVQSLAGHKSPVTAVSASETS | | |
| | | | | GDIATVCDSAGGGSDLRLWTV | | |
| | | | | NGDLVGHVHCREIICSVAFSN | | |
| | | | | QPEGVSINVIAGGLENGIVRLW | | |
| | | | | STWDLKPVREITFPKSNKPIISL | | |
| | | | | TFSCDGHHLYTANSDGTVIAW | | |
| | | | | CRKDQQRLKQPMFYSFLSSYA | | |
| | | | | AG | | |
| CTNS | 1497 | 0040531 | O60931 | MIRNWLTIFILFPLKLVEKCESS | Cystinosis | 182 |
| | | | | VSLTVPPVVKLENGSSTNVSLT | | |
| | | | | LRPPLNATLVITFEITFRSKNITI | | |
| | | | | LELPDEVVVPPGVTNSSFQVTS | | |
| | | | | QNVGQLTVYLHGNHSNQTGP | | |
| | | | | RIRFLVIRSSAISIINQVIGWIYF | | |
| | | | | VAWSISFYPQVIMNWRRKSVI | | |
| | | | | GLSFDFVALNLTGFVAYSVFNI | | |
| | | | | GLLWVPYIKEQFLLKYPNGVN | | |
| | | | | PVNSNDVFFSLHAVVLTLIIIVQ | | |
| | | | | CCLYERGGQRVSWPAIGFLVL | | |
| | | | | AWLFAFVTMIVAAVGVTTWL | | |
| | | | | QFLFCFSYIKLAVTLVKYFPQA | | |
| | | | | YMNFYYKSTEGWSIGNVLLDF | | |
| | | | | TGGSFSLLQMFLQSYNNDQWT | | |
| | | | | LIFGDPTKFGLGVFSIVFDVVFF | | |
| | | | | IQHFCLYRKRPGYDQLN | | |
| LAMP2 | 3920 | 0005893 | P13473 | MVCFRLFPVPGSGLVLVCLVL | Danon | 183 |
| | | | | GAVRSYALELNLTDSENATCL | Disease | |
| | | | | YAKWQMNFTVRYETTNKTYK | | |
| | | | | TVTISDHGTVTYNGSICGDDQ | | |
| | | | | NGPKIAVQFGPGFSWIANFTK | | |
| | | | | AASTYSIDSVSFSYNTGDNTTF | | |
| | | | | PDAEDKGILTVDELLAIRIPLN | | |
| | | | | DLFRCNSLSTLEKNDVVQHY | | |
| | | | | WDVLVQAFVQNGTVSTNEFL | | |
| | | | | CDKDKTSTVAPTIHTTVPSPTT | | |
| | | | | TPTPKEKPEAGTYSVNNGNDT | | |
| | | | | CLLATMGLQLNITQDKVASVI | | |
| | | | | NINPNTTHSTGSCRSHTALLRL | | |
| | | | | NSSTIKYLDFVFAVKNENRFYL | | |
| | | | | KEVNISMYLVNGSVFSIANNN | | |
| | | | | LSYWDAPLGSSYMCNKEQTV | | |
| | | | | SVSGAFQINTFDLRVQPFNVTQ | | |
| | | | | GKYSTAQDCSADDDNFLVPIA | | |
| | | | | VGAALAGVLILVLLAYFIGLK | | |
| | | | | HHHAGYEQF | | |
| GLA | 2717 | 0102393 | P06280 | MQLRNPELHLGCALALRFLAL | Fabry | 184 |
| | | | | VSWDIPGARALDNGLARTPTM | Disease | |
| | | | | GWLHWERFMCNLDCQEEPDS | | |
| | | | | CISEKLFMEMAELMVSEGWK | | |
| | | | | DAGYEYLCIDDCWMAPQRDS | | |
| | | | | EGRLQADPQRFPHGIRQLANY | | |
| | | | | VHSKGLKLGIYADVGNKTCA | | |
| | | | | GFPGSFGYYDIDAQTFADWGV | | |
| | | | | DLLKFDGCYCDSLENLADGYK | | |
| | | | | HMSLALNRTGRSIVYSCEWPL | | |
| | | | | YMWPFQKPNYTEIRQYCNHW | | |
| | | | | RNFADIDDSWKSIKSILDWTSF | | |
| | | | | NQERIVDVAGPGGWNDPDML | | |
| | | | | VIGNFGLSWNQQVTQMALWA | | |
| | | | | IMAAPLFMSNDLRHISPQAKA | | |
| | | | | LLQDKDVIAINQDPLGKQGYQ | | |
| | | | | LRQGDNFEVWERPLSGLAWA | | |
| | | | | VAMINRQEIGGPRSYTIAVASL | | |
| | | | | GKGVACNPACFITQLLPVKRK | | |
| | | | | LGFYEWTSRLRSHINPTGTVLL | | |
| | | | | QLENTMQMSLKDLL | | |
| CTSA | 5476 | 0064601 | P10619 | MIRAAPPPLFLLLLLLLLLVSW | Galactosialidosis | 185 |
| | | | | ASRGEAAPDQDEIQRLPGLAK | | |
| | | | | QPSFRQYSGYLKGSGSKHLHY | | |
| | | | | WFVESQKDPENSPVVLWLNG | | |
| | | | | GPGCSSLDGLLTEHGPFLVQPD | | |
| | | | | GVTLEYNPYSWNLIANVLYLE | | |
| | | | | SPAGVGFSYSDDKFYATNDTE | | |
| | | | | VAQSNFEALQDFFRLFPEYKN | | |
| | | | | NKLFLTGESYAGIYIPTLAVLV | | |
| | | | | MQDPSMNLQGLAVGNGLSSY | | |
| | | | | EQNDNSLVYFAYYHGLLGNR | | |
| | | | | LWSSLQTHCCSQNKCNFYDN | | |
| | | | | KDLECVTNLQEVARIVGNSGL | | |
| | | | | NIYNLYAPCAGGVPSHFRYEK | | |
| | | | | DTVVVQDLGNIFTRLPLKRMW | | |
| | | | | HQALLRSGDKVRMDPPCTNTT | | |
| | | | | AASTYLNNPYVRKALNIPEQL | | |
| | | | | PQWDMCNFLVNLQYRRLYRS | | |
| | | | | MNSQYLKLLSSQKYQILLYNG | | |
| | | | | DVDMACNFMGDEWFVDSLN | | |
| | | | | QKMEVQRRPWLVKYGDSGEQ | | |
| | | | | IAGFVKEFSHIAFLTIKGAGHM | | |
| | | | | VPTDKPLAAFTMFSRFLNKQP | | |
| | | | | Y | | |
| GBA | 2629 | 0177628 | P04062 | MEFSSPSREECPKPLSRVSIMA | Gaucher | 186 |
| | | | | GSLTGLLLLQAVSWASGARPC | Disease | |
| | | | | IPKSFGYSSVVCVCNATYCDSF | | |
| | | | | DPPTFPALGTFSRYESTRSGRR | | |
| | | | | MELSMGPIQANHTGTGLLLTL | | |
| | | | | QPEQKFQKVKGFGGAMTDAA | | |
| | | | | ALNILALSPPAQNLLLKSYFSE | | |
| | | | | EGIGYNIIRVPMASCDFSIRTYT | | |
| | | | | YADTPDDFQLHNFSLPEEDTK | | |
| | | | | LKIPLIHRALQLAQRPVSLLAS | | |
| | | | | PWTSPTWLKTNGAVNGKGSL | | |
| | | | | KGQPGDIYHQTWARYFVKFL | | |
| | | | | DAYAEHKLQFWAVTAENEPS | | |
| | | | | AGLLSGYPFQCLGFTPEHQRD | | |
| | | | | FIARDLGPTLANSTHHNVRLL | | |
| | | | | MLDDQRLLLPHWAKVVLTDP | | |
| | | | | EAAKYVHGIAVHWYLDFLAP | | |
| | | | | AKATLGETHRLFPNTMLFASE | | |
| | | | | ACVGSKFWEQSVRLGSWDRG | | |
| | | | | MQYSHSIITNLLYHVVGWTD | | |
| | | | | WNLALNPEGGPNWVRNFVDS | | |
| | | | | PIIVDITKDTFYKQPMFYHLGH | | |
| | | | | FSKFIPEGSQRVGLVASQKNDL | | |
| | | | | DAVALMHPDGSAVVVVLNRS | | |
| | | | | SKDVPLTIKDPAVGFLETISPG | | |
| | | | | YSIHTYLWRRQ | | |
| GAA | 2548 | 0171298 | P10253 | MGVRHPPCSHRLLAVCALVSL | Pompe | 187 |
| | | | | ATAALLGHILLHDFLLVPRELS | Disease | |
| | | | | GSSPVLEETHPAHQQGASRPG | | |
| | | | | PRDAQAHPGRPRAVPTQCDVP | | |
| | | | | PNSRFDCAPDKAITQEQCEAR | | |
| | | | | GCCYIPAKQGLQGAQMGQPW | | |
| | | | | CFFPPSYPSYKLENLSSSEMGY | | |
| | | | | TATLTRTTPTFFPKDILTLRLD | | |
| | | | | VMMETENRLHFTIKDPANRRY | | |
| | | | | EVPLETPHVHSRAPSPLYSVEF | | |
| | | | | SEEPFGVIVRRQLDGRVLLNTT | | |
| | | | | VAPLFFADQFLQLSTSLPSQYI | | |
| | | | | TGLAEHLSPLMLSTSWTRITL | | |
| | | | | WNRDLAPTPGANLYGSHPFYL | | |
| | | | | ALEDGGSAHGVFLLNSNAMD | | |
| | | | | VVLQPSPALSWRSTGGILDVYI | | |
| | | | | FLGPEPKSVVQQYLDVVGYPF | | |
| | | | | MPPYWGLGFHLCRWGYSSTAI | | |
| | | | | TRQVVENMTRAHFPLDVQWN | | |
| | | | | DLDYMDSRRDFTFNKDGFRDF | | |
| | | | | PAMVQELHQGGRRYMMIVDP | | |
| | | | | AISSSGPAGSYRPYDEGLRRGV | | |
| | | | | FITNETGQPLIGKVWPGSTAFP | | |
| | | | | DFTNPTALAWWEDMVAEFHD | | |
| | | | | QVPFDGMWIDMNEPSNFIRGS | | |
| | | | | EDGCPNNELENPPYVPGVVGG | | |
| | | | | TLQAATICASSHQFLSTHYNLH | | |
| | | | | NLYGLTEAIASHRALVKARGT | | |
| | | | | RPFVISRSTFAGHGRYAGHWT | | |
| | | | | GDVWSSWEQLASSVPEILQFN | | |
| | | | | LLGVPLVGADVCGFLGNTSEE | | |
| | | | | LCVRWTQLGAFYPFMRNHNS | | |
| | | | | LLSLPQEPYSFSEPAQQAMRK | | |
| | | | | ALTLRYALLPHLYTLFHQAHV | | |
| | | | | AGETVARPLFLEFPKDSSTWT | | |
| | | | | VDHQLLWGEALLITPVLQAGK | | |
| | | | | AEVTGYFPLGTWYDLQTVPVE | | |
| | | | | ALGSLPPPPAAPREPAIHSEGQ | | |
| | | | | WVTLPAPLDTINVHLRAGYIIP | | |
| | | | | LQGPGLTTTESRQQPMALAVA | | |
| | | | | LTKGGEARGELFWDDGESLEV | | |
| | | | | LERGAYTQVIFLARNNTIVNEL | | |
| | | | | VRVTSEGAGLQLQKVTVLGV | | |
| | | | | ATAPQQVLSNGVPVSNFTYSP | | |
| | | | | DTKVLDICVSLLMGEQFLVSW | | |
| | | | | C | | |
| IDS | 3423 | 0010404 | P22304 | MPPPRTGRGLLWLGLVLSSVC | Hunter | 188 |
| | | | | VALGSETQANSTTDALNVLLII | Disease | |
| | | | | VDDLRPSLGCYGDKLVRSPNI | | |
| | | | | DQLASHSLLFQNAFAQQAVCA | | |
| | | | | PSRVSFLTGRRPDTTRLYDFNS | | |
| | | | | YWRVHAGNFSTIPQYFKENGY | | |
| | | | | VTMSVGKVFHPGISSNHTDDS | | |
| | | | | PYSWSFPPYHPSSEKYENTKTC | | |
| | | | | RGPDGELHANLLCPVDVLDVP | | |
| | | | | EGTLPDKQSTEQAIQLLEKMK | | |
| | | | | TSASPFFLAVGYHKPHIPFRYP | | |
| | | | | KEFQKLYPLENITLAPDPEVPD | | |
| | | | | GLPPVAYNPWMDIRQREDVQ | | |
| | | | | ALNISVPYGPIPVDFQRKIRQS | | |
| | | | | YFASVSYLDTQVGRLLSALDD | | |
| | | | | LQLANSTIIAFTSDHGWALGEH | | |
| | | | | GEWAKYSNFDVATHVPLIFYV | | |
| | | | | PGRTASLPEAGEKLFPYLDPFD | | |
| | | | | SASQLMEPGRQSMDLVELVSL | | |
| | | | | FPTLAGLAGLQVPPRCPVPSFH | | |
| | | | | VELCREGKNLLKHFRFRDLEE | | |
| | | | | DPYLPGNPRELIAYSQYPRPSD | | |
| | | | | IPQWNSDKPSLKDIKIMGYSIR | | |
| | | | | TIDYRYTVWVGFNPDEFLANF | | |
| | | | | SDIHAGELYFVDSDPLQDHNM | | |
| | | | | YNDSQGGDLFQLLMP | | |
| IDUA | 3425 | 0127415 | P35475 | MRPLRPRAALLALLASLLAAP | Hurler | 189 |
| | | | | PVAPAEAPHLVHVDAARALW | Disease | |
| | | | | PLRRFWRSTGFCPPLPHSQAD | | |
| | | | | QYVLSWDQQLNLAYVGAVPH | | |
| | | | | RGIKQVRTHWLLELVTTRGST | | |
| | | | | GRGLSYNFTHLDGYLDLLREN | | |
| | | | | QLLPGFELMGSASGHFTDFED | | |
| | | | | KQQVFEWKDLVSSLARRYIGR | | |
| | | | | YGLAHVSKWNFETWNEPDHH | | |
| | | | | DFDNVSMTMQGFLNYYDACS | | |
| | | | | EGLRAASPALRLGGPGDSFHT | | |
| | | | | PPRSPLSWGLLRHCHDGTNFF | | |
| | | | | TGEAGVRLDYISLHRKGARSSI | | |
| | | | | SILEQEKVVAQQIRQLFPKFAD | | |
| | | | | TPIYNDEADPLVGWSLPQPWR | | |
| | | | | ADVTYAAMVVKVIAQHQNLL | | |
| | | | | LANTTSAFPYALLSNDNAFLS | | |
| | | | | YHPHPFAQRTLTARFQVNNTR | | |
| | | | | PPHVQLLRKPVLTAMGLLALL | | |
| | | | | DEEQLWAEVSQAGTVLDSNH | | |
| | | | | TVGVLASAHRPQGPADAWRA | | |
| | | | | AVLIYASDDTRAHPNRSVAVT | | |
| | | | | LRLRGVPPGPGLVYVTRYLDN | | |
| | | | | GLCSPDGEWRRLGRPVFPTAE | | |
| | | | | QFRRMRAAEDPVAAAPRPLPA | | |
| | | | | GGRLTLRPALRLPSLLLVHVC | | |
| | | | | ARPEKPPGQVTRLRALPLTQG | | |
| | | | | QLVLVWSDEHVGSKCLWTYEI | | |
| | | | | QFSQDGKAYTPVSRKPSTFNLF | | |
| | | | | VFSPDTGAVSGSYRVRALDY | | |
| | | | | WARPGPFSDPVPYLEVPVPRG | | |
| | | | | PPSPGNP | | |
| ISSD | 26503 | 0119899 | Q9NRA2 | MRSPVRDLARNDGEESTDRTP | Infantile Free | 190 |
| | | | | LLPGAPRAEAAPVCCSARYNL | Sialic Acid | |
| | | | | AILAFFGFFIVYALRVNLSVAL | Storage | |
| | | | | VDMVDSNTTLEDNRTSKACPE | Disease | |
| | | | | HSAPIKVHHNQTGKKYQWDA | | |
| | | | | ETQGWILGSFFYGYIITQIPGGY | | |
| | | | | VASKIGGKMLLGFGILGTAVL | | |
| | | | | TLFTPIAADLGVGPLIVLRALE | | |
| | | | | GLGEGVTFPAMHAMWSSWAP | | |
| | | | | PLERSKLLSISYAGAQLGTVISL | | |
| | | | | PLSGIICYYMNWTYVFYFFGTI | | |
| | | | | GIFWFLLWIWLVSDTPQKHKR | | |
| | | | | ISHYEKEYILSSLRNQLSSQKS | | |
| | | | | VPWVPILKSLPLWAIVVAHFS | | |
| | | | | YNWTFYTLLTLLPTYMKEILR | | |
| | | | | FNVQENGFLSSLPYLGSWLCM | | |
| | | | | ILSGQAADNLRAKWNFSTLCV | | |
| | | | | RRIFSLIGMIGPAVFLVAAGFIG | | |
| | | | | CDYSLAVAFLTISTTLGGFCSS | | |
| | | | | GFSINHLDIAPSYAGILLGITNT | | |
| | | | | FATIPGMVGPVIAKSLTPDNTV | | |
| | | | | GEWQTVFYIAAAINVFGAIFFT | | |
| | | | | LFAKGEVQNWALNDHHGHRH | | |
| ARSB | 411 | 0113273 | P15848 | MGPRGAASLPRGPGPRRLLLP | Maroteaux- | 191 |
| | | | | VVLPLLLLLLLAPPGSGAGASR | Lamy | |
| | | | | PPHLVFLLADDLGWNDVGFH | | |
| | | | | GSRIRTPHLDALAAGGVLLDN | | |
| | | | | YYTQPLCTPSRSQLLTGRYQIR | | |
| | | | | TGLQHQIIWPCQPSCVPLDEKL | | |
| | | | | LPQLLKEAGYTTHMVGKWHL | | |
| | | | | GMYRKECLPTRRGFDTYFGYL | | |
| | | | | LGSEDYYSHERCTLIDALNVT | | |
| | | | | RCALDFRDGEEVATGYKNMY | | |
| | | | | STNIFTKRAIALITNHPPEKPLF | | |
| | | | | LYLALQSVHEPLQVPEEYLKP | | |
| | | | | YDFIQDKNRHHYAGMVSLMD | | |
| | | | | EAVGNVTAALKSSGLWNNTV | | |
| | | | | FIFSTDNGGQTLAGGNNWPLR | | |
| | | | | GRKWSLWEGGVRGVGFVASP | | |
| | | | | LLKQKGVKNRELIHISDWLPTL | | |
| | | | | VKLARGHTNGTKPLDGFDVW | | |
| | | | | KTISEGSPSPRIELLHNIDPNFV | | |
| | | | | DSSPCPRNSMAPAKDDSSLPE | | |
| | | | | YSAFNTSVHAAIRHGNWKLLT | | |
| | | | | GYPGCGYWFPPPSQYNVSEIPS | | |
| | | | | SDPPTKTLWLFDIDRDPEERHD | | |
| | | | | LSREYPHIVTKLLSRLQFYHKH | | |
| | | | | SVPVYFPAQDPRCDPKATGVW | | |
| | | | | GPWM | | |
| GALNS | 2588 | 0141012 | P34059 | MAAVVAATRWWQLLLVLSA | Morquio | 192 |
| | | | | AGMGASGAPQPPNILLLLMDD | Type A | |
| | | | | MGWGDLGVYGEPSRETPNLD | | |
| | | | | RMAAEGLLFPNFYSANPLCSPS | | |
| | | | | RAALLTGRLPIRNGFYTTNAH | | |
| | | | | ARNAYTPQEIVGGIPDSEQLLP | | |
| | | | | ELLKKAGYVSKIVGKWHLGH | | |
| | | | | RPQFHPLKHGFDEWFGSPNCH | | |
| | | | | FGPYDNKARPNIPVYRDWEM | | |
| | | | | VGRYYEEFPINLKTGEANLTQI | | |
| | | | | YLQEALDFIKRQARHHPFFLY | | |
| | | | | WAVDATHAPVYASKPFLGTS | | |
| | | | | QRGRYGDAVREIDDSIGKILEL | | |
| | | | | LQDLHVADNTFVFFTSDNGAA | | |
| | | | | LISAPEQGGSNGPFLCGKQTTF | | |
| | | | | EGGMREPALAWWPGHVTAG | | |
| | | | | QVSHQLGSIMDLFTTSLALAG | | |
| | | | | LTPPSDRAIDGLNLLPTLLQGR | | |
| | | | | LMDRPIFYYRGDTLMAATLGQ | | |
| | | | | HKAHFWTWTNSWENFRQGID | | |
| | | | | FCPGQNVSGVTTHNLEDHTKL | | |
| | | | | PLIFHLGRDPGERFPLSFASAE | | |
| | | | | YQEALSRITSVVQQHQEALVP | | |
| | | | | AQPQLNVCNWAVMNWAPPG | | |
| | | | | CEKLGKCLTPPESIPKKCLWSH | | |
| GLB1 | 2720 | 0170266 | P16278 | MPGFLVRILPLLLVLLLLGPTR | Morquio | 193 |
| | | | | GLRNATQRMFEIDYSRDSFLK | Type B | |
| | | | | DGQPFRYISGSIHYSRVPRFYW | | |
| | | | | KDRLLKMKMAGLNAIQTYVP | | |
| | | | | WNFHEPWPGQYQFSEDHDVE | | |
| | | | | YFLRLAHELGLLVILRPGPYIC | | |
| | | | | AEWEMGGLPAWLLEKESILLR | | |
| | | | | SSDPDYLAAVDKWLGVLLPK | | |
| | | | | MKPLLYQNGGPVITVQVENEY | | |
| | | | | GSYFACDFDYLRFLQKRFRHH | | |
| | | | | LGDDVVLFTTDGAHKTFLKCG | | |
| | | | | ALQGLYTTVDFGTGSNITDAF | | |
| | | | | LSQRKCEPKGPLINSEFYTGWL | | |
| | | | | DHWGQPHSTIKTEAVASSLYD | | |
| | | | | ILARGASVNLYMFIGGTNFAY | | |
| | | | | WNGANSPYAAQPTSYDYDAP | | |
| | | | | LSEAGDLTEKYFALRNIIQKFE | | |
| | | | | KVPEGPIPPSTPKFAYGKVTLE | | |
| | | | | KLKTVGAALDILCPSGPIKSLY | | |
| | | | | PLTFIQVKQHYGFVLYRTTLPQ | | |
| | | | | DCSNPAPLSSPLNGVHDRAYV | | |
| | | | | AVDGIPQGVLERNNVITLNITG | | |
| | | | | KAGATLDLLVENMGRVNYGA | | |
| | | | | YINDFKGLVSNLTLSSNILTDW | | |
| | | | | TIFPLDTEDAVRSHLGGWGHR | | |
| | | | | DSGHHDEAWAHNSSNYTLPA | | |
| | | | | FYMGNFSIPSGIPDLPQDTFIQF | | |
| | | | | PGWTKGQVWINGFNLGRYWP | | |
| | | | | ARGPQLTLFVPQHILMTSAPNT | | |
| | | | | ITVLELEWAPCSSDDPELCAVT | | |
| | | | | FVDRPVIGSSVTYDHPSKPVEK | | |
| | | | | RLMPPPPQKNKDSWLDHV | | |
| NEU1 | 4758 | 0204386 | Q99519 | MTGERPSTALPDRRWGPRILG | Mucolipidosis | 194 |
| | | | | FWGGCRVWVFAAIFLLLSLAA | Type I | |
| | | | | SWSKAENDFGLVQPLVTMEQ | | |
| | | | | LLWVSGRQIGSVDTFRIPLITA | | |
| | | | | TPRGTLLAFAEARKMSSSDEG | | |
| | | | | AKFIALRRSMDQGSTWSPTAFI | | |
| | | | | VNDGDVPDGLNLGAVVSDVE | | |
| | | | | TGVVFLFYSLCAHKAGCQVAS | | |
| | | | | TMLVWSKDDGVSWSTPRNLS | | |
| | | | | LDIGTEVFAPGPGSGIQKQREP | | |
| | | | | RKGRLIVCGHGTLERDGVFCL | | |
| | | | | LSDDHGASWRYGSGVSGIPYG | | |
| | | | | QPKQENDFNPDECQPYELPDG | | |
| | | | | SVVINARNQNNYHCHCRIVLR | | |
| | | | | SYDACDTLRPRDVTFDPELVD | | |
| | | | | PVVAAGAVVTSSGIVFFSNPA | | |
| | | | | HPEFRVNLTLRWSFSNGTSWR | | |
| | | | | KETVQLWPGPSGYSSLATLEG | | |
| | | | | SMDGEEQAPQLYVLYEKGRN | | |
| | | | | HYTESISVAKISVYGTL | | |
| GNPTA | 79158 | 0111670 | Q3T906 | MLFKLLQRQTYTCLSHRYGLY | Mucolipidosis | 195 |
| | | | | VCFLGVVVTIVSAFQFGEVVL | Type II | |
| | | | | EWSRDQYHVLFDSYRDNIAGK | | |
| | | | | SFQNRLCLPMPIDVVYTWVNG | | |
| | | | | TDLELLKELQQVREQMEEEQK | | |
| | | | | AMREILGKNTTEPTKKSEKQL | | |
| | | | | ECLLTHCIKVPMLVLDPALPA | | |
| | | | | NITLKDLPSLYPSFHSASDIFNV | | |
| | | | | AKPKNPSTNVSVVVFDSTKDV | | |
| | | | | EDAHSGLLKGNSRQTVWRGY | | |
| | | | | LTTDKEVPGLVLMQDLAFLSG | | |
| | | | | FPPTFKETNQLKTKLPENLSSK | | |
| | | | | VKLLQLYSEASVALLKLNNPK | | |
| | | | | DFQELNKQTKKNMTIDGKELT | | |
| | | | | ISPAYLLWDLSAISQSKQDEDI | | |
| | | | | SASRFEDNEELRYSLRSIERHA | | |
| | | | | PWVRNIFIVTNGQIPSWLNLDN | | |
| | | | | PRVTIVTHQDVFRNLSHLPTFS | | |
| | | | | SPAIESHIHRIEGLSQKFIYLND | | |
| | | | | DVMFGKDVWPDDFYSHSKGQ | | |
| | | | | KVYLTWPVPNCAEGCPGSWIK | | |
| | | | | DGYCDKACNNSACDWDGGD | | |
| | | | | CSGNSGGSRYIAGGGGTGSIG | | |
| | | | | VGQPWQFGGGINSVSYCNQG | | |
| | | | | CANSWLADKFCDQACNVLSC | | |
| | | | | GFDAGDCGQDHFHELYKVILL | | |
| | | | | PNQTHYIIPKGECLPYFSFAEV | | |
| | | | | AKRGVEGAYSDNPIIRHASIAN | | |
| | | | | KWKTIHLIMHSGMNATTIHFN | | |
| | | | | LTFQNTNDEEFKMQITVEVDT | | |
| | | | | REGPKLNSTAQKGYENLVSPIT | | |
| | | | | LLPEAEILFEDIPKEKRFPKFKR | | |
| | | | | HDVNSTRRAQEEVKIPLVNISL | | |
| | | | | LPKDAQLSLNTLDLQLEHGDIT | | |
| | | | | LKGYNLSKSALLRSFLMNSQH | | |
| | | | | AKIKNQAIITDETNDSLVAPQE | | |
| | | | | KQVHKSILPNSLGVSERLQRLT | | |
| | | | | FPAVSVKVNGHDQGQNPPLDL | | |
| | | | | ETTARFRVETHTQKTIGGNVT | | |
| | | | | KEKPPSLIVPLESQMTKEKKIT | | |
| | | | | GKEKENSRMEENAENHIGVTE | | |
| | | | | VLLGRKLQHYTDSYLGFLPWE | | |
| | | | | KKKYFQDLLDEEESLKTQLAY | | |
| | | | | FTDSKNTGRQLKDTFADSLRY | | |
| | | | | VNKILNSKFGFTSRKVPAHMP | | |
| | | | | HMIDRIVMQELQDMFPEEFDK | | |
| | | | | TSFHKVRHSEDMQFAFSYFYY | | |
| | | | | LMSAVQPLNISQVFDEVDTDQ | | |
| | | | | SGVLSDREIRTLATRIHELPLSL | | |
| | | | | QDLTGLEHMLINCSKMLPADI | | |
| | | | | TQLNNIPPTQESYYDPNLPPVT | | |
| | | | | KSLVTNCKPVTDKIHKAYKDK | | |
| | | | | NKYRFEIMGEEEIAFKMIRTNV | | |
| | | | | SHVVGQLDDIRKNPRKFVCLN | | |
| | | | | DNIDHNHKDAQTVKAVLRDF | | |
| | | | | YESMFPIPSQFELPREYRNRFL | | |
| | | | | HMHELQEWRAYRDKLKFWT | | |
| | | | | HCVLATLIMFTIFSFFAEQLIAL | | |
| | | | | KRKIFPRRRIHKEASPNRIRV | | |
| SUMF1 | 285362 | 0144455 | Q8NBK3 | MAAPALGLVCGRCPELGLVLL | Multiple | 196 |
| | | | | LLLLSLLCGAAGSQEAGTGAG | Sulfatase | |
| | | | | AGSLAGSCGCGTPQRPGAHGS | Deficiency | |
| | | | | SAAAHRYSREANAPGPVPGER | | |
| | | | | QLAHSKMVPIPAGVFTMGTDD | | |
| | | | | PQIKQDGEAPARRVTIDAFYM | | |
| | | | | DAYEVSNTEFEKFVNSTGYLT | | |
| | | | | EAEKFGDSFVFEGMLSEQVKT | | |
| | | | | NIQQAVAAAPWWLPVKGAN | | |
| | | | | WRHPEGPDSTILHRPDHPVLH | | |
| | | | | VSWNDAVAYCTWAGKRLPTE | | |
| | | | | AEWEYSCRGGLHNRLFPWGN | | |
| | | | | KLQPKGQHYANIWQGEFPVTN | | |
| | | | | TGEDGFQGTAPVDAFPPNGYG | | |
| | | | | LYNIVGNAWEWTSDWWTVH | | |
| | | | | HSVEETLNPKGPPSGKDRVKK | | |
| | | | | GGSYMCHRSYCYRYRCAARS | | |
| | | | | QNTPDSSASNLGFRCAADRLP | | |
| | | | | TMD | | |
| SMPD1 | 6609 | 0166311 | P17405 | MPRYGASLRQSCPRSGREQGQ | Niemann- | 197 |
| | | | | DGTAGAPGLLWMGLVLALAL | Pick Disease | |
| | | | | ALALALALSDSRVLWAPAEAH | Type A; | |
| | | | | PLSPQGHPARLHRIVPRLRDVF | Niemann- | |
| | | | | GWGNLTCPICKGLFTAINLGL | Pick Disease | |
| | | | | KKEPNVARVGSVAIKLCNLLK | Type B | |
| | | | | IAPPAVCQSIVHLFEDDMVEV | | |
| | | | | WRRSVLSPSEACGLLLGSTCG | | |
| | | | | HWDIFSSWNISLPTVPKPPPKP | | |
| | | | | PSPPAPGAPVSRILFLTDLHWD | | |
| | | | | HDYLEGTDPDCADPLCCRRGS | | |
| | | | | GLPPASRPGAGYWGEYSKCDL | | |
| | | | | PLRTLESLLSGLGPAGPFDMV | | |
| | | | | YWTGDIPAHDVWHQTRQDQL | | |
| | | | | RALTTVTALVRKFLGPVPVYP | | |
| | | | | AVGNHESTPVNSFPPPFIEGNH | | |
| | | | | SSRWLYEAMAKAWEPWLPAE | | |
| | | | | ALRTLRIGGFYALSPYPGLRLIS | | |
| | | | | LNMNFCSRENFWLLINSTDPA | | |
| | | | | GQLQWLVGELQAAEDRGDKV | | |
| | | | | HIIGHIPPGHCLKSWSWNYYRI | | |
| | | | | VARYENTLAAQFFGHTHVDEF | | |
| | | | | EVFYDEETLSRPLAVAFLAPSA | | |
| | | | | TTYIGLNPGYRVYQIDGNYSG | | |
| | | | | SSHVVLDHETYILNLTQANIPG | | |
| | | | | AIPHWQLLYRARETYGLPNTL | | |
| | | | | PTAWHNLVYRMRGDMQLFQT | | |
| | | | | FWFLYHKGHPPSEPCGTPCRL | | |
| | | | | ATLCAQLSARADSPALCRHLM | | |
| | | | | PDGSLPEAQSLWPRPLFC | | |
| NPC1 | 4864 | 0141458 | O15118 | MTARGLALGLLLLLLCPAQVF | Niemann- | 198 |
| | | | | SQSCVWYGECGIAYGDKRYN | Pick Disease | |
| | | | | CEYSGPPKPLPKDGYDLVQEL | Type C | |
| | | | | CPGFFFGNVSLCCDVRQLQTL | | |
| | | | | KDNLQLPLQFLSRCPSCFYNLL | | |
| | | | | NLFCELTCSPRQSQFLNVTATE | | |
| | | | | DYVDPVTNQTKTNVKELQYY | | |
| | | | | VGQSFANAMYNACRDVEAPS | | |
| | | | | SNDKALGLLCGKDADACNAT | | |
| | | | | NWIEYMFNKDNGQAPFTITPV | | |
| | | | | FSDFPVHGMEPMNNATKGCD | | |
| | | | | ESVDEVTAPCSCQDCSIVCGPK | | |
| | | | | PQPPPPPAPWTILGLDAMYVIM | | |
| | | | | WITYMAFLLVFFGAFFAVWCY | | |
| | | | | RKRYFVSEYTPIDSNIAFSVNA | | |
| | | | | SDKGEASCCDPVSAAFEGCLR | | |
| | | | | RLFTRWGSFCVRNPGCVIFFSL | | |
| | | | | VFITACSSGLVFVRVTTNPVDL | | |
| | | | | WSAPSSQARLEKEYFDQHFGP | | |
| | | | | 1ThRTEQUIRAPLTDKHIYQPYP | | |
| | | | | SGADVPFGPPLDIQILHQVLDL | | |
| | | | | QIAIENITASYDNETVTLQDICL | | |
| | | | | APLSPYNTNCTILSVLNYFQNS | | |
| | | | | HSVLDHKKGDDFFVYADYHT | | |
| | | | | HFLYCVRAPASLNDTSLLHDP | | |
| | | | | CLGTFGGPVFPWLVLGGYDD | | |
| | | | | QNYNNATALVITFPVNNYYND | | |
| | | | | TEKLQRAQAWEKEFINFVKNY | | |
| | | | | KNPNLTISFTAERSIEDELNRES | | |
| | | | | DSDVFTVVISYAIMFLYISLAL | | |
| | | | | GHMKSCRRLLVDSKVSLGIAG | | |
| | | | | ILIVLSSVACSLGVFSYIGLPLT | | |
| | | | | LIVIEVIPFLVLAVGVDNIFILV | | |
| | | | | QAYQRDERLQGETLDQQLGR | | |
| | | | | VLGEVAPSMFLSSFSETVAFFL | | |
| | | | | GALSVMPAVHTFSLFAGLAVF | | |
| | | | | IDFLLQITCFVSLLGLDIKRQEK | | |
| | | | | NRLDIFCCVRGAEDGTSVQAS | | |
| | | | | ESCLFRFFKNSYSPLLLKDWM | | |
| | | | | RPIVIAIFVGVLSFSIAVLNKVD | | |
| | | | | IGLDQSLSMPDDSYMVDYFKS | | |
| | | | | ISQYLHAGPPVYFVLEEGHDY | | |
| | | | | TSSKGQNMVCGGMGCNNDSL | | |
| | | | | VQQIFNAAQLDNYTRIGFAPSS | | |
| | | | | WIDDYFDWVKPQSSCCRVDNI | | |
| | | | | TDQFCNASVVDPACVRCRPLT | | |
| | | | | PEGKQRPQGGDFMRFLPMFLS | | |
| | | | | DNPNPKCGKGGHAAYSSAVNI | | |
| | | | | LLGHGTRVGATYFMTYHTVL | | |
| | | | | QTSADFIDALKKARLIASNVTE | | |
| | | | | TMGINGSAYRVFPYSVFYVFY | | |
| | | | | EQYLTIIDDTIFNLGVSLGAIFL | | |
| | | | | VTMVLLGCELWSAVIMCATIA | | |
| | | | | MVLVNMFGVMWLWGISLNA | | |
| | | | | VSLVNLVMSCGISVEFCSHITR | | |
| | | | | AFTVSMKGSRVERAEEALAH | | |
| | | | | MGSSVFSGITLTKFGGIVVLAF | | |
| | | | | AKSQIFQIFYFRMYLAMVLLG | | |
| | | | | ATHGLIFLPVLLSYIGPSVNKA | | |
| | | | | KSCATEERYKGTERERLLNF | | |
| NPC2 | 10577 | 0119655 | P61916 | MRFLAATFLLLALSTAAQAEP | Niemann- | 199 |
| | | | | VQFKDCGSVDGVIKEVNVSPC | Pick Disease | |
| | | | | PTQPCQLSKGQSYSVNVTFTS | Type C | |
| | | | | NIQSKSSKAVVHGILMGVPVPF | | |
| | | | | PIPEPDGCKSGINCPIQKDKTYS | | |
| | | | | YLNKLPVKSEYPSIKLVVEWQ | | |
| | | | | LQDDKNQSLFCWEIPVQIVSHL | | |
| CTSK | 1513 | 0143387 | P43235 | MWGLKVLLLPVVSFALYPEEI | Pycnodystosis | 200 |
| | | | | LDTHWELWKKTHRKQYNNK | | |
| | | | | VDEISRRLIWEKNLKYISIHNLE | | |
| | | | | ASLGVHTYELAMNHLGDMTS | | |
| | | | | EEVVQKMTGLKVPLSHSRSND | | |
| | | | | TLYIPEWEGRAPDSVDYRKKG | | |
| | | | | YVTPVKNQGQCGSCWAFSSV | | |
| | | | | GALEGQLKKKTGKLLNLSPQN | | |
| | | | | LVDCVSENDGCGGGYMTNAF | | |
| | | | | QYVQKNRGIDSEDAYPYVGQE | | |
| | | | | ESCMYNPTGKAAKCRGYREIP | | |
| | | | | EGNEKALKRAVARVGPVSVAI | | |
| | | | | DASLTSFQFYSKGVYYDESCN | | |
| | | | | SDNLNHAVLAVGYGIQKGNK | | |
| | | | | HWIIKNSWGENWGNKGYILM | | |
| | | | | ARNKNNACGIANLASFPKM | | |
| GNS | 2799 | 0135677 | P15586 | MRLLPLAPGRLRRGSPRHLPSC | Sanfilippo | 201 |
| | | | | SPALLLLVLGGCLGVFGVAAG | Syndrome | |
| | | | | TRRPNVVLLLTDDQDEVLGG | Type A | |
| | | | | MTPLKKTKALIGEMGMTFSSA | | |
| | | | | YVPSALCCPSRASILTGKYPHN | | |
| | | | | HHVVNNTLEGNCSSKSWQKIQ | | |
| | | | | EPNTFPAILRSMCGYQTFFAGK | | |
| | | | | YLNEYGAPDAGGLEHVPLGW | | |
| | | | | SYWYALEKNSKYYNYTLSING | | |
| | | | | KARKHGENYSVDYLTDVLAN | | |
| | | | | VSLDFLDYKSNFEPFFMMIATP | | |
| | | | | APHSPWTAAPQYQKAFQNVF | | |
| | | | | APRNKNFNIHGTNKHWLIRQA | | |
| | | | | KTPMTNSSIQFLDNAFRKRWQ | | |
| | | | | TLLSVDDLVEKLVKRLEFTGE | | |
| | | | | LNNTYIFYTSDNGYHTGQFSLP | | |
| | | | | IDKRQLYEFDIKVPLLVRGPGI | | |
| | | | | KPNQTSKMLVANIDLGPTILDI | | |
| | | | | AGYDLNKTQMDGMSLLPILRG | | |
| | | | | ASNLTWRSDVLVEYQGEGRN | | |
| | | | | VTDPTCPSLSPGVSQCFPDCVC | | |
| | | | | EDAYNNTYACVRTMSALWNL | | |
| | | | | QYCEFDDQEVFVEVYNLTADP | | |
| | | | | DQITNIAKTIDPELLGKMNYRL | | |
| | | | | MMLQSCSGPTCRTPGVFDPGY | | |
| | | | | RFDPRLMFSNRGSVRTRRFSK | | |
| | | | | HLL | | |
| HGSNAT | 138050 | 0165102 | Q68CP4 | MTGARASAAEQRRAGRSGQA | Sanfilippo | 202 |
| | | | | RAAERAAGMSGAGRALAALL | Syndrome | |
| | | | | LAASVLSAALLAPGGSSGRDA | Type B | |
| | | | | QAAPPRDLDKKRHAELKMDQ | | |
| | | | | ALLLIHNELLWTNLTVYWKSE | | |
| | | | | CCYHCLFQVLVNVPQSPKAGK | | |
| | | | | PSAAAASVSTQHGSILQLNDTL | | |
| | | | | EEKEVCRLEYRFGEFGNYSLL | | |
| | | | | VKNIHNGVSEIACDLAVNEDP | | |
| | | | | VDSNLPVSIAFLIGLAVIIVISFL | | |
| | | | | RLLLSLDDFNNWISKAISSRET | | |
| | | | | DRLINSELGSPSRTDPLDGDVQ | | |
| | | | | PATWRLSALPPRLRSVDTFRGI | | |
| | | | | ALILMVFVNYGGGKYWYFKH | | |
| | | | | ASWNGLTVADLVFPWFVFIM | | |
| | | | | GSSIFLSMTSILQRGCSKFRLLG | | |
| | | | | KIAWRSFLLICIGIIIVNPNYCL | | |
| | | | | GPLSWDKVRIPGVLQRLGVTY | | |
| | | | | FVVAVLELLFAKPVPEHCASE | | |
| | | | | RSCLSLRDITSSWPQWLLILVL | | |
| | | | | EGLWLGLTFLLPVPGCPTGYL | | |
| | | | | GPGGIGDFGKYPNCTGGAAGY | | |
| | | | | IDRLLLGDDHLYQHPSSAVLY | | |
| | | | | HTEVAYDPEGILGTINSIVMAF | | |
| | | | | LGVQAGKILLYYKARTKDILIR | | |
| | | | | FTAWCCILGLISVALTKVSENE | | |
| | | | | GFIPVNKNLWSLSYVTTLSSFA | | |
| | | | | FFILLVLYPVVDVKGLWTGTP | | |
| | | | | FFYPGMNSILVYVGHEVFENY | | |
| | | | | FPFQWKLKDNQSHKEHLTQNI | | |
| | | | | VATALWVLIAYILYRKKIFWKI | | |
| NAGLU | 4669 | 0108784 | P54802 | MEAVAVAAAVGVLLLAGAGG | Sanfilippo | 203 |
| | | | | AAGDEAREAAAVRALVARLL | Syndrome | |
| | | | | GPGPAADFSVSVERALAAKPG | Type C | |
| | | | | LDTYSLGGGGAARVRVRGST | | |
| | | | | GVAAAAGLHRYLRDFCGCHV | | |
| | | | | AWSGSQLRLPRPLPAVPGELT | | |
| | | | | EATPNRYRYYQNVCTQSYSFV | | |
| | | | | WWDWARWEREIDWMALNGI | | |
| | | | | NLALAWSGQEAIWQRVYLAL | | |
| | | | | GLTQAEINEFFTGPAFLAWGR | | |
| | | | | MGNLHTWDGPLPPSWHIKQL | | |
| | | | | YLQHRVLDQMRSFGMTPVLP | | |
| | | | | AFAGHVPEAVTRVFPQVNVTK | | |
| | | | | MGSWGHFNCSYSCSFLLAPED | | |
| | | | | PIFPIIGSLFLRELIKEFGTDHIY | | |
| | | | | GADTFNEMQPPSSEPSYLAAA | | |
| | | | | TTAVYEAMTAVDTEAVWLLQ | | |
| | | | | GWLFQHQPQFWGPAQIRAVL | | |
| | | | | GAVPRGRLLVLDLFAESQPVY | | |
| | | | | TRTASFQGQPFIWCMLHNFGG | | |
| | | | | NHGLFGALEAVNGGPEAARLF | | |
| | | | | PNSTMVGTGMAPEGISQNEVV | | |
| | | | | YSLMAELGWRKDPVPDLAAW | | |
| | | | | VTSFAARRYGVSHPDAGAAW | | |
| | | | | RLLLRSVYNCSGEACRGHNRS | | |
| | | | | PLVRRPSLQMNTSIWYNRSDV | | |
| | | | | FEAWRLLLTSAPSLATSPAFRY | | |
| | | | | DLLDLTRQAVQELVSLYYEEA | | |
| | | | | RSAYLSKELASLLRAGGVLAY | | |
| | | | | ELLPALDEVLASDSRFLLGSW | | |
| | | | | LEQARAAAVSEAEADFYEQNS | | |
| | | | | RYQLTLWGPEGNILDYANKQL | | |
| | | | | AGLVANYYTPRWRLFLEALV | | |
| | | | | DSVAQGIPFQQHQFDKNVFQL | | |
| | | | | EQAFVLSKQRYPSQPRGDTVD | | |
| | | | | LAKKIFLKYYPRWVAGSW | | |
| SGSH | 6448 | 0181523 | P51688 | MSCPVPACCALLLVLGLCRAR | Sanfilippo | 204 |
| | | | | PRNALLLLADDGGFESGAYNN | Syndrome | |
| | | | | SAIATPHLDALARRSLLFRNAF | Type D | |
| | | | | TSVSSCSPSRASLLTGLPQHQN | | |
| | | | | GMYGLHQDVHHFNSFDKVRS | | |
| | | | | LPLLLSQAGVRTGIIGKKHVGP | | |
| | | | | ETVYPFDFAYTEENGSVLQVG | | |
| | | | | RNITRIKLLVRKFLQTQDDRPF | | |
| | | | | FLYVAFHDPHRCGHSQPQYGT | | |
| | | | | FCEKFGNGESGMGRIPDWTPQ | | |
| | | | | AYDPLDVLVPYFVPNTPAARA | | |
| | | | | DLAAQYTTVGRMDQGVGLVL | | |
| | | | | QELRDAGVLNDTLVIFTSDNGI | | |
| | | | | PFPSGRTNLYWPGTAEPLLVSS | | |
| | | | | PEHPKRWGQVSEAYVSLLDLT | | |
| | | | | PTILDWFSIPYPSYAIFGSKTIH | | |
| | | | | LTGRSLLPALEAEPLWATVFG | | |
| | | | | SQSHHEVTMSYPMRSVQHRHF | | |
| | | | | RLVHNLNFKMPFPIDQDFYVS | | |
| | | | | PTFQDLLNRTTAGQPTGWYKD | | |
| | | | | LRHYYYRARWELYDRSRDPH | | |
| | | | | ETQNLATDPRFAQLLEMLRDQ | | |
| | | | | LAKWQWETHDPWVCAPDGV | | |
| | | | | LEEKLSPQCQPLHNEL | | |
| NAGA | 4668 | 0198951 | P17050 | MLLKTVLLLGHVAQVLMLDN | Schindler | 205 |
| | | | | GLLQTPPMGWLAWERFRCNIN | Disease | |
| | | | | CDEDPKNCISEQLFMEMADRM | Types I and II | |
| | | | | AQDGWRDMGYTYLNIDDCWI | | |
| | | | | GGRDASGRLMPDPKRFPHGIP | | |
| | | | | FLADYVHSLGLKLGIYADMGN | | |
| | | | | FTCMGYPGTTLDKVVQDAQT | | |
| | | | | FAEWKVDMLKLDGCFSTPEER | | |
| | | | | AQGYPKMAAALNATGRPIAFS | | |
| | | | | CSWPAYEGGLPPRVNYSLLAD | | |
| | | | | ICNLWRNYDDIQDSWWSVLSI | | |
| | | | | LNWFVEHQDILQPVAGPGHW | | |
| | | | | NDPDMLLIGNFGLSLEQSRAQ | | |
| | | | | MALWTVLAAPLLMSTDLRTIS | | |
| | | | | AQNMDILQNPLMIKINQDPLGI | | |
| | | | | QGRRIHKEKSLIEVYMRPLSNK | | |
| | | | | ASALVFFSCRTDMPYRYHSSL | | |
| | | | | GQLNFTGSVIYEAQDVYSGDII | | |
| | | | | SGLRDETNFTVIINPSGVVMW | | |
| | | | | YLYPIKNLEMSQQ | | |
| GUSB | 2990 | 0169919 | P08236 | MARGSAVAWAALGPLLWGC | Sly Disease 206 | |
| | | | | ALGLQGGMLYPQESPSRECKE | | |
| | | | | LDGLWSFRADFSDNRRRGFEE | | |
| | | | | QWYRRPLWESGPTVDMPVPSS | | |
| | | | | FNDISQDWRLRHFVGWVWYE | | |
| | | | | REVILPERWTQDLRTRVVLRIG | | |
| | | | | SAHSYAIVWVNGVDTLEHEG | | |
| | | | | GYLPFEADISNLVQVGPLPSRL | | |
| | | | | RITIAINNTLTPTTLPPGTIQYLT | | |
| | | | | DTSKYPKGYFVQNTYFDFFNY | | |
| | | | | AGLQRSVLLYTTPTTYIDDITV | | |
| | | | | TTSVEQDSGLVNYQISVKGSN | | |
| | | | | LFKLEVRLLDAENKVVANGTG | | |
| | | | | TQGQLKVPGVSLWWPYLMHE | | |
| | | | | RPAYLYSLEVQLTAQTSLGPV | | |
| | | | | SDFYTLPVGIRTVAVTKSQFLI | | |
| | | | | NGKPFYFHGVNKHEDADIRGK | | |
| | | | | GFDWPLLVKDFNLLRWLGAN | | |
| | | | | AFRTSHYPYAEEVMQMCDRY | | |
| | | | | GIVVIDECPGVGLALPQFFNNV | | |
| | | | | SLHHHMQVMEEVVRRDKNHP | | |
| | | | | AVVMWSVANEPASHLESAGY | | |
| | | | | YLKMVIAHTKSLDPSRPVTFVS | | |
| | | | | NSNYAADKGAPYVDVICLNSY | | |
| | | | | YSWYHDYGHLELIQLQLATQF | | |
| | | | | ENWYKKYQKPIIQSEYGAETIA | | |
| | | | | GFHQDPPLMFTEEYQKSLLEQ | | |
| | | | | YHLGLDQKRRKYVVGELIWN | | |
| | | | | FADFMTEQSPTRVLGNKKGIF | | |
| | | | | TRQRQPKSAAFLLRERYWKIA | | |
| | | | | NETRYPHSVAKSQCLENSLFT | | |
| PSAP | 5660 | 0197746 | P07602 | MYALFLLASLLGAALAGPVLG | Sphinoglipidosis- | 207 |
| | | | | LKECTRGSAVWCQNVKTASD | Encephalopathy | |
| | | | | CGAVKHCLQTVWNKPTVKSL | | |
| | | | | PCDICKDVVTAAGDMLKDNA | | |
| | | | | TEEEILVYLEKTCDWLPKPNM | | |
| | | | | SASCKEIVDSYLPVILDIIKGEM | | |
| | | | | SRPGEVCSALNLCESLQKHLA | | |
| | | | | ELNHQKQLESNKIPELDMTEV | | |
| | | | | VAPFMANIPLLLYPQDGPRSKP | | |
| | | | | QPKDNGDVCQDCIQMVTDIQT | | |
| | | | | AVRTNSTFVQALVEHVKEECD | | |
| | | | | RLGPGMADICKNYISQYSEIAI | | |
| | | | | QMMMHMQPKEICALVGFCDE | | |
| | | | | VKEMPMQTLVPAKVASKNVIP | | |
| | | | | ALELVEPIKKHEVPAKSDVYC | | |
| | | | | EVCEFLVKEVTKLIDNNKTEK | | |
| | | | | EILDAFDKMCSKLPKSLSEECQ | | |
| | | | | EVVDTYGSSILSILLEEVSPELV | | |
| | | | | CSMLHLCSGTRLPALTVHVTQ | | |
| | | | | PKDGGFCEVCKKLVGYLDRN | | |
| | | | | LEKNSTKQEILAALEKGCSFLP | | |
| | | | | DPYQKQCDQFVAEYEPVLIEIL | | |
| | | | | VEVMDPSFVCLKIGACPSAHK | | |
| | | | | PLLGTEKCIWGPSYWCQNTET | | |
| | | | | AAQCNAVEHCKRHVWN | | |
| LAL | 3988 | 0107798 | P38571 | MKMRFLGLVVCLVLWTLHSE | Wolman | 208 |
| | | | | GSGGKLTAVDPETNMNVSEIIS | Disease | |
| | | | | YWGFPSEEYLVETEDGYILCL | | |
| | | | | NRIPHGRKNHSDKGPKPVVFL | | |
| | | | | QHGLLADSSNWVTNLANSSLG | | |
| | | | | FILADAGFDVWMGNSRGNTW | | |
| | | | | SRKHKTLSVSQDEFWAFSYDE | | |
| | | | | MAKYDLPASINFILNKTGQEQ | | |
| | | | | VYYVGHSQGTTIGFIAFSQIPEL | | |
| | | | | AKRIKMFFALGPVASVAFCTSP | | |
| | | | | MAKLGRLPDHLIKDLFGDKEF | | |
| | | | | LPQSAFLKWLGTHVCTHVILK | | |
| | | | | ELCGNLCFLLCGFNERNLNMS | | |
| | | | | RVDVYTTHSPAGTSVQNMLH | | |
| | | | | WSQAVKFQKFQAFDWGSSAK | | |
| | | | | NYFHYNQSYPPTYNVKDMLV | | |
| | | | | PTAVWSGGHDWLADVYDVNI | | |
| | | | | LLTQITNLVFHESIPEWEHLDFI | | |
| | | | | WGLDAPWRLYNKIINLMRKY | | |
| | | | | Q | | |

[0658] In some embodiments, the protein agent is other than a clotting factor, e.g., other than Factor VII or Factor IX. In some embodiments, the protein agent is other than a reporter protein, e.g., fluorescent protein, e.g., GFP or luciferase. In some the protein agent is other than a cell surface receptor, an NGF receptor, galactocerebrosidase, gp91 phox, IFN-alpha, TK, GCV, and autoimmune antigen, cytokine, angiogenesis inhibitor, or anti-cancer agent, or a fragment or variant thereof.

### VII. Insulator Elements

[0659] In some embodiments, a fusosome, retroviral or lentiviral vector, or VLP further comprises one or more insulator elements, e.g., an insulator element described herein. Insulators elements may contribute to protecting lentivirus-expressed sequences, e.g., therapeutic polypeptides, from integration site effects, which may be mediated by cis-acting elements present in genomic DNA and lead to deregulated expression of transferred sequences (e.g., position effect; see, e.g., Burgess-Beusse et al, 2002, Proc. Natl. Acad. Sci., USA, 99: 16433; and Zhan et al, 2001, Hum. Genet., 109:471) or deregulated expression of endogenous sequences adjacent to the transferred sequences. In some embodiments, transfer vectors comprise one or more insulator element the 3′ LTR and upon integration of the provirus into the host genome, the provirus comprises the one or more insulators at the 5′ LTR and/or 3′ LTR, by virtue of duplicating the 3′ LTR. Suitable insulators include, but are not limited to, the chicken β-globin insulator (see Chung et al, 1993. Cell 74:505; Chung et al, 1997. N4S 94:575; and Bell et al., 1999. Cell 98:387, incorporated by reference herein) or an insulator from a human β-globin locus, such as chicken HS4. In some embodiments the insulator binds CCCTC binding factor (CTCF). In some embodiments the insulator is a barrier insulator. In some embodiments the insulator is an enhancer-blocking insulator. See, e.g., Emery et al., Human Gene Therapy, 2011, and in Browning and Trobridge, Biomedicines, 2016, both of which are included in their entirety by reference.

[0660] In some embodiments, insulators in the retroviral nucleic acid reduce genotoxicity in recipient cells. Genotoxicity can be measured, e.g., as described in Cesana et al, “Uncovering and dissecting the genotoxicity of self-inactivating lentiviral vectors in vivo” Mol Ther. 2014 April; 22(4):774-85. doi: 10.1038/mt.2014.3. Epub 2014 Jan. 20.

### IX. Physical and Functional Characteristics of Fusosomes

[0661] In some embodiments, the fusosome is capable of delivering (e.g., delivers) an agent, e.g., a protein, nucleic acid (e.g., mRNA), organelle, or metabolite to the cytosol of a target cell. Similarly, in some embodiments, a method herein comprises delivering an agent to the cytosol of a target cell. In some embodiments, the agent is a protein (or a nucleic acid encoding the protein, e.g., an mRNA encoding the protein) which is absent, mutant, or at a lower level than wild-type in the target cell. In some embodiments, the target cell is from a subject having a genetic disease, e.g., a monogenic disease, e.g., a monogenic intracellular protein disease. In some embodiments, the agent comprises a transcription factor, e.g., an exogenous transcription factor or an endogenous transcription factor. In some embodiments, the fusosome further comprises, or the method further comprises delivering, one or more (e.g., at least 2, 3, 4, 5, 10, 20, or 50) additional transcription factors, e.g., exogenous transcription factors, endogenous transcription factors, or a combination thereof.

[0662] In some embodiments, the fusosome comprises (e.g., is capable of delivering to the target cell) a plurality of agents (e.g., at least 2, 3, 4, 5, 10, 20, or 50 agents), wherein each agent of the plurality acts on a step of a pathway in the target cell, e.g., wherein the pathway is a biosynthetic pathway, a catabolic pathway, or a signal transduction cascade. In embodiments, each agent in the plurality upregulates the pathway or downregulates the pathway. In some embodiments, the fusosome further comprises, or the method further comprises delivering, one more additional agents (e.g., comprises a second plurality of agents) that do not act on a step of the pathway, e.g., that act on a step of a second pathway. In some embodiments, the fusosome comprises (e.g., is capable of delivering to the target cell), or the method further comprises delivering, a plurality of agents (e.g., at least 2, 3, 4, 5, 10, 20, or 50 agents), wherein each agent of the plurality is part of a single pathway, e.g., wherein the pathway is a biosynthetic pathway, a catabolic pathway, or a signal transduction cascade. In some embodiments, the fusosome further comprises, or the method further comprises delivering, one more additional agents (e.g., comprises a second plurality of agents) that are not part of the single pathway, e.g., are part of a second pathway.

[0663] In some embodiments, the target cell comprises an aggregated or misfolded protein. In some embodiments, the fusosome is capable of reducing levels (e.g., reduces levels) of the aggregated or misfolded protein in the target cell, or a method herein comprises reducing levels of the aggregated or misfolded protein in the target cell.

[0664] In some embodiments, the agent is selected from a transcription factor, enzyme (e.g., nuclear enzyme or cytosolic enzyme), reagent that mediates a sequence specific modification to DNA (e.g., Cas9, ZFN, or TALEN), mRNA (e.g., mRNA encoding an intracellular protein), organelle, or metabolite.

[0665] In some embodiments, the fusosome is capable of delivering (e.g., delivers) an agent, e.g., a protein, to the cell membrane of a target cell. Similarly, in some embodiments, a method herein comprises delivering an agent to the cell membrane of a target cell. In some embodiments, delivering the protein comprises delivering a nucleic acid (e.g., mRNA) encoding the protein to the target cell such that the target cell produces the protein and localizes it to the membrane. In some embodiments, the fusosome comprises, or the method further comprises delivering, the protein, and fusion of the fusosome with the target cell transfers the protein to the cell membrane of the target cell. In some embodiments, the agent comprises a cell surface ligand or an antibody that binds a cell surface receptor. In some embodiments, the fusosome further comprises, or the method further comprises delivering, a second agent that comprises or encodes a second cell surface ligand or antibody that binds a cell surface receptor, and optionally further comprising or encoding one or more additional cell surface ligands or antibodies that bind a cell surface receptor (e.g., 1, 2, 3, 4, 5, 10, 20, 50, or more). In some embodiments, the first agent and the second agent form a complex, wherein optionally the complex further comprises one or more additional cell surface ligands. In some embodiments, the agent comprises or encodes a cell surface receptor, e.g., an exogenous cell surface receptor. In some embodiments, the fusosome further comprises, or the method further comprises delivering, a second agent that comprises or encodes a second cell surface receptor, and optionally further comprises or encodes one or more additional cell surface receptors (e.g., 1, 2, 3, 4, 5, 10, 20, 50, or more cell surface receptors).

[0666] In some embodiments, the first agent and the second agent form a complex, wherein optionally the complex further comprises one or more additional cell surface receptors. In some embodiments, the agent comprises or encodes an antigen or an antigen presenting protein.

[0667] In some embodiments, the fusosome is capable of delivering (e.g., delivers) a secreted agent, e.g., a secreted protein to a target site (e.g., an extracellular region), e.g., by delivering a nucleic acid (e.g., mRNA) encoding the protein to the target cell under conditions that allow the target cell to produce and secrete the protein. Similarly, in some embodiments, a method herein comprises delivering a secreted agent as described herein. In embodiments, the secreted protein is endogenous or exogenous. In embodiments, the secreted protein comprises a protein therapeutic, e.g., an antibody molecule, a cytokine, or an enzyme. In embodiments, the secreted protein comprises an autocrine signalling molecule or a paracrine signalling molecule. In embodiments, the secreted agent comprises a secretory granule.

[0668] In some embodiments, the fusosome is capable of reprogramming (e.g., reprograms) a target cell (e.g., an immune cell), e.g., by delivering an agent selected from a transcription factor or mRNA, or a plurality of said agents. Similarly, in some embodiments, a method herein comprises reprogramming a target cell. In embodiments, reprogramming comprises inducing a pancreatic endocrine cell to take on one or more characteristics of a pancreatic beta cell, by inducing a non-dopaminergic neuron to take on one or more characteristics of a dopaminergic neuron, or by inducing an exhausted T cell to take on one or more characteristics of a non-exhausted T cell, e.g., a killer T cell. In some embodiments, the agent comprises an antigen. In some embodiments, the fusosome comprises a first agent comprising an antigen and a second agent comprising an antigen presenting protein.

[0669] In some embodiments, the fusosome is capable of donating (e.g., donates) one or more cell surface receptors to a target cell (e.g., an immune cell). Similarly, in some embodiments, a method herein comprises donating one or more cell surface receptors.

[0670] In some embodiments, a fusosome is capable of modifying, e.g., modifies, a target tumor cell. Similarly, in some embodiments, a method herein comprises modifying a target tumor cell. In embodiments, the fusosome comprises an mRNA encoding an immunostimulatory ligand, an antigen presenting protein, a tumor suppressor protein, or a pro-apoptotic protein. In some embodiments, the fusosome comprises an miRNA capable of reducing levels in a target cell of an immunosuppressive ligand, a mitogenic signal, or a growth factor.

[0671] In some embodiments, a fusosome comprises an agent that is immunomodulatory, e.g., immunostimulatory.

[0672] In some embodiments, a fusosome is capable of causing (e.g., causes) the target cell to present an antigen. Similarly, in some embodiments, a method herein comprises presenting an antigen on a target cell.

[0673] In some embodiments, the fusosome promotes regeneration in a target tissue. Similarly, in some embodiments, a method herein comprises promoting regeneration in a target tissue. In embodiments, the target cell is a cardiac cell, e.g., a cardiomyocyte (e.g., a quiescent cardiomyocyte), a hepatoblast (e.g., a bile duct hepatoblast), an epithelial cell, a naïve T cell, a macrophage (e.g., a tumor infiltrating macrophage), or a fibroblast (e.g., a cardiac fibroblast). In embodiments, the source cell is a T cell (e.g., a Treg), a macrophage, or a cardiac myocyte.

[0674] In some embodiments, the fusosome is capable of delivering (e.g., delivers) a nucleic acid to a target cell, e.g., to stably modify the genome of the target cell, e.g., for gene therapy. Similarly, in some embodiments, a method herein comprises delivering a nucleic acid to a target cell. In some embodiments, the target cell has an enzyme deficiency, e.g., comprises a mutation in an enzyme leading to reduced activity (e.g., no activity) of the enzyme.

[0675] In some embodiments, the fusosome is capable of delivering (e.g., delivers) a reagent that mediates a sequence specific modification to DNA (e.g., Cas9, ZFN, or TALEN) in the target cell. Similarly, in some embodiments, a method herein comprises delivering the reagent to the target cell. In embodiments, the target cell is a HSC.

[0676] In some embodiments, the fusosome is capable of delivering (e.g., delivers) a nucleic acid to a target cell, e.g., to transiently modify gene expression in the target cell.

[0677] In some embodiments, the fusosome is capable of delivering (e.g., delivers) a protein to a target cell, e.g., to transiently rescue a protein deficiency. Similarly, in some embodiments, a method herein comprises delivering a protein to a target cell. In embodiments, the protein is a membrane protein (e.g., a membrane transporter protein), a cytoplasmic protein (e.g., an enzyme), or a secreted protein (e.g., an immunosuppressive protein).

[0678] In some embodiments, the fusosome is capable of delivering (e.g., delivers) an organelle to a target cell, e.g., wherein the target cell has a defective organelle network. Similarly, in some embodiments, a method herein comprises delivering an organelle to a target cell. In embodiments, the source cell is a hepatocyte, skeletal muscle cell, or neuron.

[0679] In some embodiments, the fusosome is capable of delivering (e.g., delivers) a nucleus to a target cell, e.g., wherein the target cell has a genetic mutation. Similarly, in some embodiments, a method herein comprises delivering a nucleus to a target cell. In some embodiments, the nucleus is autologous and comprises one or more genetic changes relative to the target cell, e.g., it comprises a sequence specific modification to DNA (e.g., Cas9, ZFN, or TALEN), or an artificial chromosome, an additional genetic sequence integrated into the genome, a deletion, or any combination thereof. In embodiments, the source of the autologous nucleus is a stem cell, e.g., a hematopoietic stem cell. In embodiments, the target cell is a muscle cell (e.g., a skeletal muscle cell or cardiomyocyte), a hepatocyte, or a neuron.

[0680] In some embodiments, the fusosome is capable of intracellular molecular delivery, e.g., delivers a protein agent to a target cell. Similarly, in some embodiments, a method herein comprises delivering a molecule to an intracellular region of a target cell. In embodiments, the protein agent is an inhibitor. In embodiments, the protein agent comprises a nanobody, scFv, camelid antibody, peptide, macrocycle, or small molecule.

[0681] In some embodiments, the fusosome is capable of causing (e.g., causes) a target cell to secrete a protein, e.g., a therapeutic protein. Similarly, in some embodiments, a method herein comprises causing a target cell to secrete a protein.

[0682] In some embodiments, the fusosome is capable of secreting (e.g., secretes) an agent, e.g., a protein. In some embodiments, the agent, e.g., secreted agent, is delivered to a target site in a subject. In some embodiments, the agent is a protein that can not be made recombinantly or is difficult to make recombinantly. In some embodiments, the fusosome that secretes a protein is from a source cell selected from an MSC or a chondrocyte.

[0683] In some embodiments, the fusosome comprises on its membrane one or more cell surface ligands (e.g., 1, 2, 3, 4, 5, 10, 20, 50, or more cell surface ligands). Similarly, in some embodiments, a method herein comprises presenting one or more cell surface ligands to a target cell. In some embodiments, the fusosome having a cell surface ligand is from a source cell chosen from a neutrophil (e.g., and the target cell is a tumor-infiltrating lymphocyte), dendritic cell (e.g., and the target cell is a naïve T cell), or neutrophil (e.g., and the target is a tumor cell or virus-infected cell). In some embodiments the fusosome comprises a membrane complex, e.g., a complex comprising at least 2, 3, 4, or 5 proteins, e.g., a homodimer, heterodimer, homotrimer, heterotrimer, homotetramer, or heterotetramer. In some embodiments, the fusosome comprises an antibody, e.g., a toxic antibody, e.g., the fusosome is capable of delivering the antibody to the target site, e.g., by homing to a target site. In some embodiments, the source cell is an NK cell or neutrophil.

[0684] In some embodiments, a method herein comprises causing secretion of a protein from a target cell or ligand presentation on the surface of a target cell. In some embodiments, the fusosome is capable of causing cell death of the target cell. In some embodiments, the fusosome is from a NK source cell.

[0685] In some embodiments, a fusosome or target cell is capable of phagocytosis (e.g., of a pathogen). Similarly, in some embodiments, a method herein comprises causing phagocytosis.

[0686] In some embodiments, a fusosome senses and responds to its local environment. In some embodiments, the fusosome is capable of sensing level of a metabolite, interleukin, or antigen.

[0687] In embodiments, a fusosome is capable of chemotaxis, extravasation, or one or more metabolic activities. In embodiments, the metabolic activity is selected from kyneurinine, gluconeogenesis, prostaglandin fatty acid oxidation, adenosine metabolism, urea cycle, and thermogenic respiration. In some embodiments, the source cell is a neutrophil and the fusosome is capable of homing to a site of injury. In some embodiments, the source cell is a macrophage and the fusosome is capable of phagocytosis. In some embodiments, the source cell is a brown adipose tissue cell and the fusosome is capable of lipolysis.

[0688] In some embodiments, the fusosome comprises (e.g., is capable of delivering to the target cell) a plurality of agents (e.g., at least 2, 3, 4, 5, 10, 20, or 50 agents). In embodiments, the fusosome comprises an inhibitory nucleic acid (e.g., siRNA or miRNA) and an mRNA.

[0689] In some embodiments, the fusosome comprises (e.g., is capable of delivering to the target cell) a membrane protein or a nucleic acid encoding the membrane protein. In embodiments, the fusosome is capable of reprogramming or transdifferentiating a target cell, e.g., the fusosome comprises one or more agents that induce reprogramming or transdifferentiation of a target cell.

[0690] In some embodiments, the subject is in need of regeneration. In some embodiments, the subject suffers from cancer, an autoimmune disease, an infectious disease, a metabolic disease, a neurodegenerative disease, or a genetic disease (e.g., enzyme deficiency).

[0691] In some embodiments (e.g., embodiments for assaying non-endocytic delivery of cargo) cargo delivery is assayed using one or more of (e.g., all of) the following steps: (a) placing 30,000 HEK-293T target cells into a first well of a 96-well plate comprising 100 nM bafilomycin A1, and placing a similar number of similar cells into a second well of a 96-well plate lacking bafilomycin A1, (b) culturing the target cells for four hours in DMEM media at 37° C. and 5% CO2, (c) contacting the target cells with 10 ug of fusosomes that comprise cargo, (d) incubating the target cells and fusosomes for 24 hrs at 37° C. and 5% CO2, and (e) determining the percentage of cells in the first well and in the second well that comprise the cargo. Step (e) may comprise detecting the cargo using microscopy, e.g., using immunofluorescence. Step (e) may comprise detecting the cargo indirectly, e.g., detecting a downstream effect of the cargo, e.g., presence of a reporter protein. In some embodiments, one or more of steps (a)-(e) above is performed as described in Example 78.

[0692] In some embodiments, an inhibitor of endocytosis (e.g., chloroquine or bafilomycin A1) inhibits inhibits endosomal acidification. In some embodiments, cargo delivery is independent of lysosomal acidification. In some embodiments, an inhibitor of endocytosis (e.g., Dynasore) inhibits dynamin. In some embodiments, cargo delivery is independent of dynamin activity.

[0693] In some embodiments (e.g., embodiments for specific delivery of cargo to a target cell versus a non-target cell), cargo delivery is assayed using one or more of (e.g., all of) the following steps: (a) placing 30,000 HEK-293T target cells that over-express CD8a and CD8b into a first well of a 96-well plate and placing 30,000 HEK-293T non-target cells that do not over-express CD8a and CD8b into a second well of a 96-well plate, (b) culturing the cells for four hours in DMEM media at 37° C. and 5% CO2, (c) contacting the target cells with 10 ug of fusosomes that comprise cargo, (d) incubating the target cells and fusosomes for 24 hrs at 37° C. and 5% CO2, and (e) determining the percentage of cells in the first well and in the second well that comprise the cargo. Step (e) may comprise detecting the cargo using microscopy, e.g., using immunofluorescence. Step (e) may comprise detecting the cargo indirectly, e.g., detecting a downstream effect of the cargo, e.g., presence of a reporter protein. In some embodiments, one or more of steps (a)-(e) above is performed as described in Example 69.

[0694] In some embodiments, the fusosome fuses at a higher rate with a target cell than with a non-target cell, e.g., by at least at least 1%, 2%, 3%, 4%, 5%, 10%, 20%, 30%, 40%, 50%, 60%, 70%, 80%, 90%, 2-fold, 3-fold, 4-fold, 5-fold, 10-fold, 20-fold, 50-fold, or 100-fold, e.g., in an assay of Example 40. In some embodiments, the fusosome fuses at a higher rate with a target cell than with other fusosomes, e.g., by at least 10%, 20%, 30%, 40%, 50%, 60%, 70%, 80%, or 90%, e.g., in an assay of Example 40. In some embodiments, the fusosome fuses with target cells at a rate such that an agent in the fusosome is delivered to at least 10%, 20%, 30%, 40%, 50%, 60%, 70%, 80%, or 90%, of target cells after 24, 48, or 72 hours, e.g., in an assay of Example 40. In embodiments, the amount of targeted fusion is about 30%-70%, 35%-65%, 40%-60%, 45%-55%, or 45%-50%, e.g., about 48.8% e.g., in an assay of Example 40. In embodiments, the amount of targeted fusion is about 20%-40%, 25%-35%, or 30%-35%, e.g., about 32.2% e.g., in an assay of Example 41.

[0695] In some embodiments, the fusogen is present at a copy number of at least, or no more than, 10, 50, 100, 500, 1,000, 2,000, 5,000, 10,000, 20,000, 50,000, 100,000, 200,000, 500,000, 1,000,000, 5,000,000, 10,000,000, 50,000,000, 100,000,000, 500,000,000, or 1,000,000,000 copies, e.g., as measured by an assay of Example 24. In some embodiments, at least 10%, 20%, 30%, 40%, 50%, 60%, 70%, 80%, 90%, 95%, 96%, 97%, 98%, or 99% of the fusogen comprised by the fusosome is disposed in the cell membrane. In embodiments, the fusosome also comprises fusogen internally, e.g., in the cytoplasm or an organelle. In some embodiments, the fusogen comprises (or is identified as comprising) about 0.1%, 0.2%, 0.3%, 0.4%, 0.5%, 0.6%, 0.7%, 0.8%, 0.9%, 1%, 5%, 10%, 11%, 12%, 13%, 14%, 15%, 20%, or more, or about 1-30%, 5-20%, 10-15%, 12-15%, 13-14%, or 13.6% of the total protein in a fusosome, e.g., as determined according to the method described in Example 92 and/or by a mass spectrometry assay. In embodiments, the fusogen comprises(or is identified as comprising) about 13.6% of the total protein in the fusosome. In some embodiments, the fusogen is (or is identified as being) more or less abundant than one or more additional proteins of interest, e.g., as determined according to the method described in Example 92. In an embodiment, the fusogen has (or is identified as having) a ratio to EGFP of about 140, 145, 150, 151, 152, 153, 154, 155, 156, 157 (e.g., 156.9), 158, 159, 160, 165, or 170. In another embodiment, the fusogen has (or is identified as having) a ratio to CD63 of about 2700, 2800, 2900, 2910 (e.g., 2912), 2920, 2930, 2940, 2950, 2960, 2970, 2980, 2990, or 3000, or about 1000-5000, 2000-4000, 2500-3500, 2900-2930, 2910-2915, or 2912.0, e.g., by a mass spectrometry assay. In an embodiment, the fusogen has (or is identified as having) a ratio to ARRDC1 of about 600, 610, 620, 630, 640, 650, 660 (e.g., 664.9), 670, 680, 690, or 700. In another embodiment, the fusogen has (or is identified as having) a ratio to GAPDH of about 50, 55, 60, 65, 70 (e.g., 69), 75, 80, or 85, or about 1-30%, 5-20%, 10-15%, 12-15%, 13-14%, or 13.6%. In another embodiment, the fusogen has (or is identified as having) a ratio to CNX of about 500, 510, 520, 530, 540, 550, 560 (e.g., 558.4), 570, 580, 590, or 600, or about 300-800, 400-700, 500-600, 520-590, 530-580, 540-570, 550-560, or 558.4, e.g., by a mass spectrometry assay.

[0696] In some embodiments, the fusosome comprises a therapeutic agent at a copy number of at least, or no more than, 10, 50, 100, 500, 1,000, 2,000, 5,000, 10,000, 20,000, 50,000, 100,000, 200,000, 500,000, 1,000,000, 5,000,000, 10,000,000, 50,000,000, 100,000,000, 500,000,000, or 1,000,000,000 copies, e.g., as measured by an assay of Example 86. In some embodiments, the fusosome comprises a protein therapeutic agent at a copy number of at least 10, 50, 100, 500, 1,000, 2,000, 5,000, 10,000, 20,000, 50,000, 100,000, 200,000, 500,000, 1,000,000, 5,000,000, 10,000,000, 50,000,000, 100,000,000, 500,000,000, or 1,000,000,000 copies, e.g., as measured by an assay of Example 86. In some embodiments, the fusosome comprises a nucleic acid therapeutic agent at a copy number of at least 10, 50, 100, 500, 1,000, 2,000, 5,000, 10,000, 20,000, 50,000, 100,000, 200,000, 500,000, 1,000,000, 5,000,000, 10,000,000, 50,000,000, 100,000,000, 500,000,000, or 1,000,000,000 copies. In some embodiments, the fusosome comprises a DNA therapeutic agent at a copy number of at least 10, 50, 100, 500, 1,000, 2,000, 5,000, 10,000, 20,000, 50,000, 100,000, 200,000, 500,000, 1,000,000, 5,000,000, 10,000,000, 50,000,000, 100,000,000, 500,000,000, or 1,000,000,000 copies. In some embodiments, the fusosome comprises an RNA therapeutic agent at a copy number of at least 10, 50, 100, 500, 1,000, 2,000, 5,000, 10,000, 20,000, 50,000, 100,000, 200,000, 500,000, 1,000,000, 5,000,000, 10,000,000, 50,000,000, 100,000,000, 500,000,000, or 1,000,000,000 copies. In some embodiments, the fusosome comprises an exogenous therapeutic agent at a copy number of at least 10, 50, 100, 500, 1,000, 2,000, 5,000, 10,000, 20,000, 50,000, 100,000, 200,000, 500,000, 1,000,000, 5,000,000, 10,000,000, 50,000,000, 100,000,000, 500,000,000, or 1,000,000,000 copies. In some embodiments, the fusosome comprises an exogenous protein therapeutic agent at a copy number of at least 10, 50, 100, 500, 1,000, 2,000, 5,000, 10,000, 20,000, 50,000, 100,000, 200,000, 500,000, 1,000,000, 5,000,000, 10,000,000, 50,000,000, 100,000,000, 500,000,000, or 1,000,000,000 copies. In some embodiments, the fusosome comprises an exogenous nucleic acid (e.g., DNA or RNA) therapeutic agent at a copy number of at least 10, 50, 100, 500, 1,000, 2,000, 5,000, 10,000, 20,000, 50,000, 100,000, 200,000, 500,000, 1,000,000, 5,000,000, 10,000,000, 50,000,000, 100,000,000, 500,000,000, or 1,000,000,000 copies. In some embodiments, the ratio of the copy number of the fusogen to the copy number of the therapeutic agent is between 1,000,000:1 and 100,000:1, 100,000:1 and 10,000:1, 10,000:1 and 1,000:1, 1,000:1 and 100:1, 100:1 and 50:1, 50:1 and 20:1, 20:1 and 10:1, 10:1 and 5:1, 5:1 and 2:1, 2:1 and 1:1, 1:1 and 1:2, 1:2 and 1:5, 1:5 and 1:10, 1:10 and 1:20, 1:20 and 1:50, 1:50 and 1:100, 1:100 and 1:1,000, 1:1,000 and 1:10,000, 1:10,000 and 1:100,000, or 1:100,000 and 1:1,000,000.

[0697] In some embodiments, the fusosome delivers to a target cell at least 10, 50, 100, 500, 1,000, 2,000, 5,000, 10,000, 20,000, 50,000, 100,000, 200,000, 500,000, 1,000,000, 5,000,000, 10,000,000, 50,000,000, 100,000,000, 500,000,000, or 1,000,000,000 copies of a therapeutic agent. In some embodiments, the fusosome delivers to a target cell at least 10, 50, 100, 500, 1,000, 2,000, 5,000, 10,000, 20,000, 50,000, 100,000, 200,000, 500,000, 1,000,000, 5,000,000, 10,000,000, 50,000,000, 100,000,000, 500,000,000, or 1,000,000,000 copies of a protein therapeutic agent. In some embodiments, the fusosome delivers to a target cell at least 10, 50, 100, 500, 1,000, 2,000, 5,000, 10,000, 20,000, 50,000, 100,000, 200,000, 500,000, 1,000,000, 5,000,000, 10,000,000, 50,000,000, 100,000,000, 500,000,000, or 1,000,000,000 copies of a nucleic acid therapeutic agent. In some embodiments, the fusosome delivers to a target cell at least 10, 50, 100, 500, 1,000, 2,000, 5,000, 10,000, 20,000, 50,000, 100,000, 200,000, 500,000, 1,000,000, 5,000,000, 10,000,000, 50,000,000, 100,000,000, 500,000,000, or 1,000,000,000 copies of an RNA therapeutic agent. In some embodiments, the fusosome delivers to a target cell at least 10, 50, 100, 500, 1,000, 2,000, 5,000, 10,000, 20,000, 50,000, 100,000, 200,000, 500,000, 1,000,000, 5,000,000, 10,000,000, 50,000,000, 100,000,000, 500,000,000, or 1,000,000,000 copies of a DNA therapeutic agent.

[0698] In some embodiments, the fusosome delivers to a target cell at least 10%, 20%, 30%, 40%, 50%, 60%, 70%, 80%, 90%, 95%, 96%, 97%, 98%, or 99% of the cargo (e.g., a therapeutic agent, e.g., an endogenous therapeutic agent or an exogenous therapeutic agent) comprised by the fusosome. In some embodiments, the fusosomes that fuse with the target cell(s) deliver to the target cell an average of at least 10%, 20%, 30%, 40%, 50%, 60%, 70%, 80%, 90%, 95%, 96%, 97%, 98%, or 99% of the cargo (e.g., a therapeutic agent, e.g., an endogenous therapeutic agent or an exogenous therapeutic agent) comprised by the fusosomes that fuse with the target cell(s). In some embodiments, the fusosome composition delivers to a target tissue at least 10%, 20%, 30%, 40%, 50%, 60%, 70%, 80%, 90%, 95%, 96%, 97%, 98%, or 99% of the cargo (e.g., a therapeutic agent, e.g., an endogenous therapeutic agent or an exogenous therapeutic agent) comprised by the fusosome composition.

[0699] In some embodiments, the fusosome comprises 0.00000001 mg fusogen to 1 mg fusogen per mg of total protein in fusosome, e.g., 0.00000001-0.0000001, 0.0000001-0.000001, 0.000001-0.00001, 0.00001-0.0001, 0.0001-0.001, 0.001-0.01, 0.01-0.1, or 0.1-1 mg fusogen per mg of total protein in fusosome. In some embodiments, the fusosome comprises 0.00000001 mg fusogen to 5 mg fusogen per mg of lipid in fusosome, e.g., 0.00000001-0.0000001, 0.0000001-0.000001, 0.000001-0.00001, 0.00001-0.0001, 0.0001-0.001, 0.001-0.01, 0.01-0.1, 0.1-1, or 1-5 mg fusogen per mg of lipid in fusosome.

[0700] In some embodiments, the cargo is a protein cargo. In embodiments, the cargo is an endogenous or synthetic protein cargo. In some embodiments, the fusosomes have (or are identified as having) at least 1, 2, 3, 4, 5, 10, 20, 50, 100, or more protein cargo molecules per fusosome. In an embodiment, the fusosomes have (or are identified as having) about 100, 110, 120, 130, 140, 150, 160, 166, 170, 180, 190, or 200 protein agent molecules per fusosome, e.g., as quantified according to the method described in Example 86. In some embodiments, the endogenous or synthetic protein cargo comprises (or is identified as comprising) about 0.1%, 0.2%, 0.3%, 0.4%, 0.5%, 1%, 5%, 10%, 15%, 20%, 25% or more of the total protein in a fusosome. In an embodiment, the synthetic protein cargo comprises (or is identified as comprising) about 13.6% of the total protein in a fusosome. In some embodiments, the synthetic protein cargo has (or is identified as having) a ratio to VSV-G of about 4×10⁻³, 5×10⁻³, 6×10⁻³ (e.g., 6.37×10⁻³), 7×10⁻³, or 8×10⁻³. In embodiments, the synthetic protein cargo has (or is identified as having) a ratio to CD63 of about 10, 15, 16, 17, 18 (e.g., 18.6), 19, 20, 25, or 30, or about 10-30, 15-25, 16-19, 18-19, or 18.6. In embodiments, the synthetic protein cargo has (or is identified as having) a ratio to ARRDC1 of about 2, 3, 4 (e.g., 4.24), 5, 6, or 7. In embodiments, the synthetic protein cargo has (or is identified as having) a ratio to GAPDH of about 0.1, 0.2, 0.3, 0.4 (e.g., 0.44), 0.5, 0.6, or 0.7. In embodiments, the synthetic protein cargo has (or is identified as having) a ratio to CNX of about 1, 2, 3 (e.g., 3.56), 4, 5, or 6. In embodiments, the synthetic protein cargo has (or is identified as having) a ratio to TSG101 of about 10, 15, 16, 17, 18, 19 (e.g., 19.52), 20, 21, 22, 23, 24, 25, or 30.

[0701] In some embodiments, the fusogen comprises (or is identified as comprising) at least 0.5%, 1%, 5%, 10%, or more of the total protein in a fusosome, e.g., by a mass spectrometry assay. In an embodiment, the fusogen comprises (or is identified as comprising) about 1-30%, 5-20%, 10-15%, 12-15%, 13-14%, or 13.6% of the total protein in a fusosome, e.g., by a mass spectrometry assay. In some embodiments, the fusogen is more abundant than other proteins of interest. In embodiments, the fusogen has (or is identified as having) a ratio to a payload protein, e.g., EGFP, of about 145-170, 150-165, 155-160, 156.9, e.g., by a mass spectrometry assay. In embodiments, the fusogen has(or is identified as having) a ratio to CD63 of about 1000-5000, 2000-4000, 2500-3500, 2900-2930, 2910-2915, or 2912.0, e.g., by a mass spectrometry assay. In embodiments, the fusogen has a ratio to ARRDC1 of about 300-1000, 400-900, 500-800, 600-700, 640-690, 650-680, 660-670, or 664.9, e.g., by a mass spectrometry assay. In embodiments, the fusogen has(or is identified as having) a ratio to GAPDH of about 20-120, 40-100, 50-90, 60-80, 65-75, 68-70, or 69.0, e.g., by a mass spectrometry assay. In embodiments, the fusogen has a ratio to CNX of about 200-900, 300-800, 400-700, 500-600, 520-590, 530-580, 540-570, 550-560, or 558.4, e.g., by a mass spectrometry assay. In embodiments, the mass spectrometry essay is an assay of Example 92.

[0702] In some embodiments, the number of lipid species present in both of (e.g., shared between) the fusosomes and source cells is (or is identified as being) at least 300, 400, 500, 550, 560, or 569, or is between 500-700, 550-600, or 560-580, e.g., using a mass spectrometry assay. In embodiments, the number of lipid species present in fusosomes at a level at least 25% of the corresponding lipid level in the source cells (both normalized to total lipid levels within a sample) is (or is identified as being) at least 300, 400, 500, 530, 540, or 548, or is between 400-700, 500-600, 520-570, 530-560, or 540-550, e.g., using a mass spectrometry assay. In some embodiments, the fraction of lipid species present in both of (e.g., shared between) the fusosomes and source cells to total lipid species in the source cell is (or is identified as being) about 0.4-1.0, 0.5-0.9, 0.6-0.8, or 0.7, or at least 0.4, 0.5, 0.6, or 0.7, e.g., using a mass spectrometry assay. In some embodiments, the mass spectrometry assay is an assay of Example 84.

[0703] In some embodiments, the number of protein species present in both of (e.g., shared between) the fusosomes are source cells is (or is identified as being) at least 500, 1000, 1100, 1200, 1300, 1400, 1487, 1500, or 1600, or is (or is identified as being) between 1200-1700, 1300-1600, 1400-1500, 1450-1500, or 1480-1490, e.g., using a mass spectrometry assay. In embodiments, the number of protein species present in fusosomes at a level at least 25% of the corresponding protein level in the source cells (both normalized to total protein levels within a sample) is (or is identified as being) at least 500, 600, 700, 800, 900, 950, 957, 1000, or 1200, e.g., using a mass spectrometry assay. In some embodiments, the fraction of protein species present in both of (e.g., shared between) the fusosomes and source cells to total protein species in the source cell is (or is identified as being) about 0.1-0.6, 0.2-0.5, 0.3-0.4, or 0.333, or at least about 0.1, 0.2, 0.3, 0.333, or 0.4, e.g., using a mass spectrometry assay. In embodiments, the mass spectrometry assay is an assay of Example 85.

[0704] In some embodiments, CD63 is (or is identified as being) present at less than 0.048%, 0.05%, 0.1%, 0.5%, 1%, 2%, 3%, 4%, 5%, or 10% the amount of total protein in fusosomes, e.g., by a mass spectrometry assay, e.g., an assay of Example 87.

[0705] In some embodiments, the fusosomes are produced by extrusion through a filter, e.g., a filter of about 1-10, 2-8, 3-7, 4-6, or 5 um. In some embodiments, the fusosomes have (or is identified as having) an average diameter of about 1-5, 2-5, 3-5, 4-5, or 5 um. In some embodiments, the fusosomes have (or is identified as having) an average diameter of at least 1, 2, 3, 4, or 5 um.

[0706] In some embodiments, the fusosomes are enriched for (or are identified as being enriched for) one or more of (e.g., at least 2, 3, 4, 5, or all of) the following lipids compared to the source cells: cholesteryl ester, free cholesterol, ether-linked lyso-phosphatidylethanolamine, lyso-phosphatidylserine, phosphatidate, ether-linked phosphatidylethanolamine, phosphatidylserine, and sphingomyelin. In some embodiments, the fusosomes are depleted for (or are identified as being depleted for) one or more of (e.g., at least 2, 3, 4, 5, or all of) the following lipids compared to the source cells: ceramide, cardiolipin, lyso-phosphatidylcholine, lyso-phosphatidylethanolamine, lyso-phosphatidylglycerol, lyso-phosphatidylinositol, ether-linked phosphatidylcholine, phosphatidylethanolamine, phosphatidylglycerol, phosphatidylinositol, and triacylglycerol. In some embodiments, the fusosomes are enriched for (or are identified as being enriched for) one or more of the aforementioned enriched lipids and depleted for one or more of the aforementioned depleted lipids. In some embodiments, the fusosomes comprise (or are identified as comprising) the enriched lipid as a percentage of total lipid that is at least 10%, 20%, 30%, 40%, 50%, 60%, 70%, 80%, 90%, 2-fold, 5-fold, or 10-fold greater than the corresponding level in source cells. In some embodiments, the fusosome comprise (or are identified as comprising) the depleted lipid as a percentage of total lipid at a level that is less than 90%, 80%, 70%, 60%, 50%, 40%, 30%, 20%, or 10% of the corresponding level in the source cells. In embodiments, lipid enrichment is measured by a mass spectrometry assay, e.g., an assay of Example 94.

[0707] In some embodiments, CE lipid levels are (or are identified as being) about 2-fold greater in fusosomes than in exosomes and/or about 5, 6, 7, 8, 9, or 10-fold higher in fusosomes than in parental cells (relative to total lipid in a sample). In some embodiments, ceramide lipid levels are (or are identified as being) about 2, 3, 4, or 5-fold greater in parental cells than in fusosomes (relative to total lipid in a sample). In some embodiments, cholesterol levels are (or are identified as being) about 1.1, 1.2, 1.3, 1.4, 1.5, 1.6, 1.7, 1.8, 1.9, or 2-fold greater in exosomes than in fusosomes and/or about 2-fold higher in fusosomes than in parental cells (relative to total lipid in a sample). In some embodiments, CL lipid levels are (or are identified as being) at least about 5, 10, 20, 30, or 40-fold greater in parental cells than in fusosomes (relative to total lipid in a sample). In some embodiments, DAG lipid levels are (or are identified as being) about 2 or 3-fold greater in exosomes than in fusosomes and/or about 1.5 or 2-fold higher in parental cells than in fusosomes (relative to total lipid in a sample). In some embodiments, PC lipid levels are (or are identified as being) about equal between exosomes and fusosomes and/or about 1.3, 1.4, 1.5, 1.6, 1.7, or 1.8-fold higher in parental cells than in fusosomes (relative to total lipid in a sample). In some embodiments, PC O- lipid levels are (or are identified as being) about equal between exosomes and fusosomes and/or about 2-fold higher in parental cells than in fusosomes (relative to total lipid in a sample). In some embodiments, PE lipid levels are (or are identified as being) about 1.3, 1.4, 1.5, 1.6, 1.7, or 1.8-fold higher in fusosomes than in exosomes and/or about 1.3, 1.4, 1.5, 1.6, 1.7, or 1.8-fold higher in parental cells than in fusosomes (relative to total lipid in a sample). In some embodiments, PE O- lipid levels are (or are identified as being) about equal between exosomes and fusosomes and/or about 1.5, 1.6, 1.7, 1.8, 1.9, or 2-fold higher in parental cells than in fusosomes (relative to total lipid in a sample). In some embodiments, PG lipid levels are (or are identified as being) about equal between exosomes and fusosomes and/or about 2, 3, 4, 5, 6, 7, 8, 9, or 10-fold higher in parental cells than in fusosomes (relative to total lipid in a sample). In some embodiments, PI lipid levels are (or are identified as being) about equal between exosomes and fusosomes and/or about 3, 4, 5, 6, or 7-fold higher in parental cells than in fusosomes (relative to total lipid in a sample). In some embodiments, PS lipid levels are (or are identified as being) (or are identified as being) about equal between exosomes and fusosomes and/or about 2-fold higher in fusosomes than in parental cells (relative to total lipid in a sample). In some embodiments, SM lipid levels are (or are identified as being) about equal between exosomes and fusosomes and/or about 2, 2.5, or 3-fold higher in fusosomes than in parental cells (relative to total lipid in a sample). In some embodiments, TAG lipid levels are (or are identified as being) about equal between exosomes and fusosomes and/or about 10, 20, 30, 40, 50, 60, 70 80, 90, 100-fold, or more higher in parental cells than in fusosomes (relative to total lipid in a sample).

[0708] In some embodiments, the fusosomes are (or are identified as being) enriched for one or more of (e.g., at least 2, 3, 4, 5, or all of) the following lipids compared to exosomes: cholesteryl ester, ceramide, diacylglycerol, lyso-phosphatidate, and phosphatidylethanolamine, and triacylglycerol. In some embodiments, the fusosomes are (or are identified as being) depleted for one or more of (e.g., at least 2, 3, 4, 5, or all of) the following lipids compared to exosomes (relative to total lipid in a sample): free cholesterol, hexosyl ceramide, lyso-phosphatidylcholine, ether-linked lyso-phosphatidylcholine, lyso-phosphatidylethanolamine, ether-linked lyso-phosphatidylethanolamine, and lyso-phosphatidylserine. In some embodiments, the fusosomes are (or are identified as being) enriched for one or more of the aforementioned enriched lipids and depleted for one or more of the aforementioned depleted lipids. In some embodiments, the fusosomes comprise (or are identified as comprising) the enriched lipid as a percentage of total lipid that is at least 10%, 20%, 30%, 40%, 50%, 60%, 70%, 80%, 90%, 2-fold, 5-fold, or 10-fold greater than the corresponding level in exosomes. In some embodiments, the fusosome comprise (or are identified as comprising) the depleted lipid as a percentage of total lipid at a level that is less than 90%, 80%, 70%, 60%, 50%, 40%, 30%, 20%, or 10% of the corresponding level in exosomes. In embodiments, lipid enrichment is measured by a mass spectrometry assay, e.g., an assay of Example 94.

[0709] In some embodiments, ceramide lipid levels are (or are identified as being) about 2-fold higher in fusosomes than in exosomes and/or about 2-fold higher in parental cells than in fusosomes (relative to total lipid in a sample). In some embodiments, HexCer lipid levels are (or are identified as being) about 1.5, 1.6, 1.7, 1.8, 1.9, or 2-fold higher in exosomes than in fusosomes and/or about equal in parental cells and fusosomes (relative to total lipid in a sample). In some embodiments, LPA lipid levels are (or are identified as being) about 3 or 4-fold higher in fusosomes than in exosomes and/or about 1.3, 1.4, 1.5, 1.6, 1.7, or 1.8-fold higher in fusosomes than in parental cells (relative to total lipid in a sample). In some embodiments, LPC lipid levels are (or are identified as being) about 2-fold higher in exosomes than in fusosomes and/or about 1.5, 1.6, 1.7, 1.8, 1.9, or 2-fold higher in parental cells than in fusosomes (relative to total lipid in a sample). In some embodiments, LPC O- lipid levels are (or are identified as being) about 3 or 4-fold higher in exosomes than in fusosomes and/or about equal between parental cells and fusosomes (relative to total lipid in a sample). In some embodiments, LPE lipid levels are (or are identified as being) about 1.5, 1.6, 1.7, 1.8, 1.9, or 2-fold higher in exosomes than in fusosomes and/or about 1.5, 1.6, 1.7, 1.8, 1.9, or 2-fold higher in parental cells than in fusosomes (relative to total lipid in a sample). In some embodiments, LPE O- lipid levels are (or are identified as being) about 2 or 3-fold higher in exosomes than in fusosomes and/or about equal between parental cells and fusosomes (relative to total lipid in a sample). In some embodiments, LPS lipid levels are (or are identified as being) about 3-fold higher in exosomes than in fusosomes (relative to total lipid in a sample). In some embodiments, PA lipid levels are (or are identified as being) about 1.5, 1.6, 1.7, 1.8, 1.9, or 2-fold higher in fusosomes than in exosomes and/or about 2-fold higher in fusosomes than in parental cells (relative to total lipid in a sample). In some embodiments, PG lipid levels are (or are identified as being) about equal between fusosomes and exosomes and/or about 10, 11, 12, 13, 14, or 15-fold higher in parental cells than in fusosomes (relative to total lipid in a sample).

[0710] In some embodiments, the fusosome comprises a lipid composition substantially similar to that of the source cell or wherein one or more of CL, Cer, DAG, HexCer, LPA, LPC, LPE, LPG, LPI, LPS, PA, PC, PE, PG, PI, PS, CE, SM and TAG is within 10%, 15%, 20%, 25%, 30%, 35%, 40%, 45%, or 50% of the corresponding lipid level in the source cell. In embodiments, the lipid composition of fusosomes is similar to the cells from which they are derived. In embodiments, fusosomes and parental cells have (or are identified as having) a similar lipid composition if greater than or equal to about 50%, 55%, 60%, 65%, 70%, 75%, 80%, 85%, or 90% of the lipid species identified in any replicate sample of the parental cells are present (or are identified as being present) in any replicate sample of the fusosomes, e.g., as determined according to Example 84. In embodiments, of identified lipids, the average level in the fusosome is greater than about 10%, 15%, 20%, 25%, 30%, 35%, or 40% of the corresponding average lipid species level in the parental cell (relative to total lipid in a sample). In an embodiment, the lipid composition of the fusosome is enriched and/or depleted for specific lipids relative to the parental cell (relative to total lipid in a sample).

[0711] In some embodiments, the lipid composition of the fusosome is (or is identified as bring) enriched and/or depleted for specific lipids relative to the parental cell, e.g., as determined according to the method described in Example 94.

[0712] In some embodiments, the fusosome has (or is identified as having) a ratio of phosphatidylserine to total lipids that is greater than that of the parental cell. In embodiments, the fusosome has (or is identified as having) a ratio of phosphatidylserine to total lipids of about 110%, 115%, 120%, 121%, 122%, 123%, 124%, 125%, 130%, 135%, 140%, or more relative to that of the parental cell. In some embodiments, the fusosome is (or is identified as being) enriched for cholesteryl ester, free cholesterol, ether-linked lyso-phosphatidylethanolamine, lyso-phosphatidylserine, phosphatidate, ether-linked phosphatidylethanolamine, phosphatidylserine, and/or sphingomyelin relative to the parental cell. In some embodiments, the fusosomes is (or is identified as being) depleted for ceramide, cardiolipin, lyso-phosphatidylcholine, lyso-phosphatidylethanolamine, lyso-phosphatidylglycerol, lyso-phosphatidylinositol, ether-linked phosphatidylcholine, phosphatidylethanolamine, phosphatidylglycerol, phosphatidylinositol, and/or triacylglycerol relative to the parental cell. In some embodiments, the fusosome is (or is identified as being) enriched for cholesteryl ester, ceramide, diacylglycerol, lyso-phosphatidate, phosphatidylethanolamine, and/or triacylglycerol relative to an exosome. In some embodiments, the fusosome is (or is identified as being) depleted for free cholesterol, hexosyl ceramide, lyso-phosphatidylcholine, ether-linked lyso-phosphatidylcholine, lyso-phosphatidylethanolamine, ether-linked lyso-phosphatidylethanolamine, and/or lyso-phosphatidylserine relative to an exosome.

[0713] In some embodiments, the fusosome has a ratio of cardiolipin:ceramide that is within 10%, 20%, 30%, 40%, or 50% of the ratio of cardiolipin:ceramide in the source cell; or has a ratio of cardiolipin:diacylglycerol that is within 10%, 20%, 30%, 40%, or 50% of the ratio of cardiolipin:diacylglycerol in the source cell; or has a ratio of cardiolipin:hexosylceramide that is within 10%, 20%, 30%, 40%, or 50% of the ratio of cardiolipin:hexosylceramide in the source cell; or has a ratio of cardiolipin:lysophosphatidate that is within 10%, 20%, 30%, 40%, or 50% of the ratio of cardiolipin:lysophosphatidate in the source cell; or has a ratio of cardiolipin:lyso-phosphatidylcholine that is within 10%, 20%, 30%, 40%, or 50% of the ratio of cardiolipin:lyso-phosphatidylcholine in the source cell; or has a ratio of cardiolipin:lyso-phosphatidylethanolamine that is within 10%, 20%, 30%, 40%, or 50% of the ratio of cardiolipin:lyso-phosphatidylethanolamine in the source cell; or has a ratio of cardiolipin:lyso-phosphatidylglycerol that is within 10%, 20%, 30%, 40%, or 50% of the ratio of cardiolipin:lyso-phosphatidylglycerol in the source cell; or has a ratio of cardiolipin:lyso-phosphatidylinositol that is within 10%, 20%, 30%, 40%, or 50% of the ratio of cardiolipin:lyso-phosphatidylinositol in the source cell; or has a ratio of cardiolipin:lyso-phosphatidylserine that is within 10%, 20%, 30%, 40%, or 50% of the ratio of cardiolipin:lyso-phosphatidylserine in the source cell; or has a ratio of cardiolipin:phosphatidate that is within 10%, 20%, 30%, 40%, or 50% of the ratio of cardiolipin:phosphatidate in the source cell; or has a ratio of cardiolipin:phosphatidylcholine that is within 10%, 20%, 30%, 40%, or 50% of the ratio of cardiolipin:phosphatidylcholine in the source cell; or has a ratio of cardiolipin:phosphatidylethanolamine that is within 10%, 20%, 30%, 40%, or 50% of the ratio of cardiolipin:phosphatidylethanolamine in the source cell; or has a ratio of cardiolipin:phosphatidylglycerol that is within 10%, 20%, 30%, 40%, or 50% of the ratio of cardiolipin:phosphatidylglycerol in the source cell; or has a ratio of cardiolipin:phosphatidylinositol that is within 10%, 20%, 30%, 40%, or 50% of the ratio of cardiolipin:phosphatidylinositol in the source cell; or has a ratio of cardiolipin:phosphatidylserine that is within 10%, 20%, 30%, 40%, or 50% of the ratio of cardiolipin:phosphatidylserine in the source cell; or has a ratio of cardiolipin:cholesterol ester that is within 10%, 20%, 30%, 40%, or 50% of the ratio of cardiolipin:cholesterol ester in the source cell; or has a ratio of cardiolipin:sphingomyelin that is within 10%, 20%, 30%, 40%, or 50% of the ratio of cardiolipin:sphingomyelin in the source cell; or has a ratio of cardiolipin:triacylglycerol that is within 10%, 20%, 30%, 40%, or 50% of the ratio of cardiolipin:triacylglycerol in the source cell; or has a ratio of phosphatidylcholine:ceramide that is within 10%, 20%, 30%, 40%, or 50% of the ratio of phosphatidylcholine:ceramide in the source cell; or has a ratio of phosphatidylcholine:diacylglycerol that is within 10%, 20%, 30%, 40%, or 50% of the ratio of phosphatidylcholine:diacylglycerol in the source cell; or has a ratio of phosphatidylcholine:hexosylceramide that is within 10%, 20%, 30%, 40%, or 50% of the ratio of phosphatidylcholine:hexosylceramide in the source cell; or has a ratio of phosphatidylcholine:lysophosphatidate that is within 10%, 20%, 30%, 40%, or 50% of the ratio of phosphatidylcholine:lysophosphatidate in the source cell; or has a ratio of phosphatidylcholine:lyso-phosphatidylcholine that is within 10%, 20%, 30%, 40%, or 50% of the ratio of phosphatidylcholine:lyso-phosphatidylcholine in the source cell; or has a ratio of phosphatidylcholine:lyso-phosphatidylethanolamine that is within 10%, 20%, 30%, 40%, or 50% of the ratio of phosphatidylcholine:lyso-phosphatidylethanolamine in the source cell; or has a ratio of phosphatidylcholine:lyso-phosphatidylglycerol that is within 10%, 20%, 30%, 40%, or 50% of the ratio of phosphatidylcholine:lyso-phosphatidylglycerol in the source cell; or has a ratio of phosphatidylcholine:lyso-phosphatidylinositol that is within 10%, 20%, 30%, 40%, or 50% of the ratio of phosphatidylcholine:lyso-phosphatidylinositol in the source cell; or has a ratio of phosphatidylcholine:lyso-phosphatidylserine that is within 10%, 20%, 30%, 40%, or 50% of the ratio of phosphatidylcholine:lyso-phosphatidylserine in the source cell; or has a ratio of phosphatidylcholine:phosphatidate that is within 10%, 20%, 30%, 40%, or 50% of the ratio of cardiolipin:phosphatidate in the source cell; or has a ratio of phosphatidylcholine:phosphatidylethanolamine that is within 10%, 20%, 30%, 40%, or 50% of the ratio of phosphatidylcholine:phosphatidylethanolamine in the source cell; or has a ratio of cardiolipin:phosphatidylglycerol that is within 10%, 20%, 30%, 40%, or 50% of the ratio of phosphatidylcholine:phosphatidylglycerol in the source cell; or has a ratio of phosphatidylcholine:phosphatidylinositol that is within 10%, 20%, 30%, 40%, or 50% of the ratio of phosphatidylcholine:phosphatidylinositol in the source cell; or has a ratio of phosphatidylcholine:phosphatidylserine that is within 10%, 20%, 30%, 40%, or 50% of the ratio of phosphatidylcholine:phosphatidylserine in the source cell; or has a ratio of phosphatidylcholine:cholesterol ester that is within 10%, 20%, 30%, 40%, or 50% of the ratio of phosphatidylcholine:cholesterol ester in the source cell; or has a ratio of phosphatidylcholine:sphingomyelin that is within 10%, 20%, 30%, 40%, or 50% of the ratio of phosphatidylcholine:sphingomyelin in the source cell; or has a ratio of phosphatidylcholine:triacylglycerol that is within 10%, 20%, 30%, 40%, or 50% of the ratio of phosphatidylcholine:triacylglycerol in the source cell; or has a ratio of phosphatidylethanolamine:ceramide that is within 10%, 20%, 30%, 40%, or 50% of the ratio of phosphatidylethanolamine:ceramide in the source cell; or has a ratio of phosphatidylethanolamine:diacylglycerol that is within 10%, 20%, 30%, 40%, or 50% of the ratio of phosphatidylethanolamine:diacylglycerol in the source cell; or has a ratio of phosphatidylethanolamine:hexosylceramide that is within 10%, 20%, 30%, 40%, or 50% of the ratio of phosphatidylethanolamine:hexosylceramide in the source cell; or has a ratio of phosphatidylethanolamine:lysophosphatidate that is within 10%, 20%, 30%, 40%, or 50% of the ratio of phosphatidylethanolamine:lysophosphatidate in the source cell; or has a ratio of phosphatidylethanolamine:lyso-phosphatidylcholine that is within 10%, 20%, 30%, 40%, or 50% of the ratio of phosphatidylethanolamine:lyso-phosphatidylcholine in the source cell; or has a ratio of phosphatidylethanolamine:lyso-phosphatidylethanolamine that is within 10%, 20%, 30%, 40%, or 50% of the ratio of phosphatidylethanolamine:lyso-phosphatidylethanolamine in the source cell; or has a ratio of phosphatidylethanolamine:lyso-phosphatidylglycerol that is within 10%, 20%, 30%, 40%, or 50% of the ratio of phosphatidylethanolamine:lyso-phosphatidylglycerol in the source cell; or has a ratio of phosphatidylethanolamine:lyso-phosphatidylinositol that is within 10%, 20%, 30%, 40%, or 50% of the ratio of phosphatidylethanolamine:lyso-phosphatidylinositol in the source cell; or has a ratio of phosphatidylethanolamine:lyso-phosphatidylserine that is within 10%, 20%, 30%, 40%, or 50% of the ratio of phosphatidylethanolamine:lyso-phosphatidylserine in the source cell; or has a ratio of phosphatidylethanolamine:phosphatidate that is within 10%, 20%, 30%, 40%, or 50% of the ratio of phosphatidylethanolamine:phosphatidate in the source cell; or has a ratio of phosphatidylethanolamine:phosphatidylglycerol that is within 10%, 20%, 30%, 40%, or 50% of the ratio of phosphatidylethanolamine:phosphatidylglycerol in the source cell; or has a ratio of phosphatidylethanolamine:phosphatidylinositol that is within 10%, 20%, 30%, 40%, or 50% of the ratio of phosphatidylethanolamine:phosphatidylinositol in the source cell; or has a ratio of phosphatidylethanolamine:phosphatidylserine that is within 10%, 20%, 30%, 40%, or 50% of the ratio of phosphatidylethanolamine:phosphatidylserine in the source cell; or has a ratio of phosphatidylethanolamine:cholesterol ester that is within 10%, 20%, 30%, 40%, or 50% of the ratio of phosphatidylethanolamine:cholesterol ester in the source cell; or has a ratio of phosphatidylethanolamine:sphingomyelin that is within 10%, 20%, 30%, 40%, or 50% of the ratio of phosphatidylethanolamine:sphingomyelin in the source cell; or has a ratio of phosphatidylethanolamine:triacylglycerol that is within 10%, 20%, 30%, 40%, or 50% of the ratio of phosphatidylethanolamine:triacylglycerol in the source cell; or has a ratio of phosphatidylserine:ceramide that is within 10%, 20%, 30%, 40%, or 50% of the ratio of phosphatidylserine:ceramide in the source cell; or has a ratio of phosphatidylserine:diacylglycerol that is within 10%, 20%, 30%, 40%, or 50% of the ratio of phosphatidylserine:diacylglycerol in the source cell; or has a ratio of phosphatidylserine:hexosylceramide that is within 10%, 20%, 30%, 40%, or 50% of the ratio of phosphatidylserine:hexosylceramide in the source cell; or has a ratio of phosphatidylserine:lysophosphatidate that is within 10%, 20%, 30%, 40%, or 50% of the ratio of phosphatidylserine:lysophosphatidate in the source cell; or has a ratio of phosphatidylserine:lyso-phosphatidylcholine that is within 10%, 20%, 30%, 40%, or 50% of the ratio of phosphatidylserine:lyso-phosphatidylcholine in the source cell; or has a ratio of phosphatidylserine:lyso-phosphatidylethanolamine that is within 10%, 20%, 30%, 40%, or 50% of the ratio of phosphatidylserine:lyso-phosphatidylethanolamine in the source cell; or has a ratio of phosphatidylserine:lyso-phosphatidylglycerol that is within 10%, 20%, 30%, 40%, or 50% of the ratio of phosphatidylserine:lyso-phosphatidylglycerol in the source cell; or has a ratio of phosphatidylserine:lyso-phosphatidylinositol that is within 10%, 20%, 30%, 40%, or 50% of the ratio of phosphatidylserine:lyso-phosphatidylinositol in the source cell; or has a ratio of phosphatidylserine:lyso-phosphatidylserine that is within 10%, 20%, 30%, 40%, or 50% of the ratio of phosphatidylserine:lyso-phosphatidylserine in the source cell; or has a ratio of phosphatidylserine:phosphatidate that is within 10%, 20%, 30%, 40%, or 50% of the ratio of phosphatidylserine:phosphatidate in the source cell; or has a ratio of phosphatidylserine:phosphatidylglycerol that is within 10%, 20%, 30%, 40%, or 50% of the ratio of phosphatidylserine:phosphatidylglycerol in the source cell; or has a ratio of phosphatidylserine:phosphatidylinositol that is within 10%, 20%, 30%, 40%, or 50% of the ratio of phosphatidylserine:phosphatidylinositol in the source cell; or has a ratio of phosphatidylserine: cholesterol ester that is within 10%, 20%, 30%, 40%, or 50% of the ratio of phosphatidylserine:cholesterol ester in the source cell; or has a ratio of phosphatidylserine:sphingomyelin that is within 10%, 20%, 30%, 40%, or 50% of the ratio of phosphatidylserine:sphingomyelin in the source cell; or has a ratio of phosphatidylserine:triacylglycerol that is within 10%, 20%, 30%, 40%, or 50% of the ratio of phosphatidylserine:triacylglycerol in the source cell; or has a ratio of sphingomyelin:ceramide that is within 10%, 20%, 30%, 40%, or 50% of the ratio of sphingomyelin:ceramide in the source cell; or has a ratio of sphingomyelin:diacylglycerol that is within 10%, 20%, 30%, 40%, or 50% of the ratio of sphingomyelin:diacylglycerol in the source cell; or has a ratio of sphingomyelin:hexosylceramide that is within 10%, 20%, 30%, 40%, or 50% of the ratio of sphingomyelin:hexosylceramide in the source cell; or has a ratio of sphingomyelin:lysophosphatidate that is within 10%, 20%, 30%, 40%, or 50% of the ratio of sphingomyelin:lysophosphatidate in the source cell; or has a ratio of sphingomyelin:lyso-phosphatidylcholine that is within 10%, 20%, 30%, 40%, or 50% of the ratio of sphingomyelin:lyso-phosphatidylcholine in the source cell; or has a ratio of sphingomyelin:lyso-phosphatidylethanolamine that is within 10%, 20%, 30%, 40%, or 50% of the ratio of sphingomyelin:lyso-phosphatidylethanolamine in the source cell; or has a ratio of sphingomyelin:lyso-phosphatidylglycerol that is within 10%, 20%, 30%, 40%, or 50% of the ratio of sphingomyelin:lyso-phosphatidylglycerol in the source cell; or has a ratio of sphingomyelin:lyso-phosphatidylinositol that is within 10%, 20%, 30%, 40%, or 50% of the ratio of sphingomyelin:lyso-phosphatidylinositol in the source cell; or has a ratio of sphingomyelin:lyso-phosphatidylserine that is within 10%, 20%, 30%, 40%, or 50% of the ratio of sphingomyelin:lyso-phosphatidylserine in the source cell; or has a ratio of sphingomyelin:phosphatidate that is within 10%, 20%, 30%, 40%, or 50% of the ratio of sphingomyelin:phosphatidate in the source cell; or has a ratio of sphingomyelin:phosphatidylglycerol that is within 10%, 20%, 30%, 40%, or 50% of the ratio of sphingomyelin:phosphatidylglycerol in the source cell; or has a ratio of sphingomyelin:phosphatidylinositol that is within 10%, 20%, 30%, 40%, or 50% of the ratio of sphingomyelin:phosphatidylinositol in the source cell; or has a ratio of sphingomyelin:cholesterol ester that is within 10%, 20%, 30%, 40%, or 50% of the ratio of sphingomyelin:cholesterol ester in the source cell; or has a ratio of sphingomyelin:triacylglycerol that is within 10%, 20%, 30%, 40%, or 50% of the ratio of sphingomyelin:triacylglycerol in the source cell; or has a ratio of cholesterol ester:ceramide that is within 10%, 20%, 30%, 40%, or 50% of the ratio of cholesterol ester:ceramide in the source cell; or has a ratio of cholesterol ester:diacylglycerol that is within 10%, 20%, 30%, 40%, or 50% of the ratio of cholesterol ester:diacylglycerol in the source cell; or has a ratio of cholesterol ester:hexosylceramide that is within 10%, 20%, 30%, 40%, or 50% of the ratio of cholesterol ester:hexosylceramide in the source cell; or has a ratio of cholesterol ester:lysophosphatidate that is within 10%, 20%, 30%, 40%, or 50% of the ratio of cholesterol ester:lysophosphatidate in the source cell; or has a ratio of cholesterol ester:lyso-phosphatidylcholine that is within 10%, 20%, 30%, 40%, or 50% of the ratio of cholesterol ester:lyso-phosphatidylcholine in the source cell; or has a ratio of cholesterol ester: lyso-phosphatidylethanolamine that is within 10%, 20%, 30%, 40%, or 50% of the ratio of cholesterol ester:lyso-phosphatidylethanolamine in the source cell; or has a ratio of cholesterol ester:lyso-phosphatidylglycerol that is within 10%, 20%, 30%, 40%, or 50% of the ratio of cholesterol ester:lyso-phosphatidylglycerol in the source cell; or has a ratio of cholesterol ester:lyso-phosphatidylinositol that is within 10%, 20%, 30%, 40%, or 50% of the ratio of cholesterol ester:lyso-phosphatidylinositol in the source cell; or has a ratio of cholesterol ester:lyso-phosphatidylserine that is within 10%, 20%, 30%, 40%, or 50% of the ratio of cholesterol ester:lyso-phosphatidylserine in the source cell; or has a ratio of cholesterol ester:phosphatidate that is within 10%, 20%, 30%, 40%, or 50% of the ratio of cholesterol ester:phosphatidate in the source cell; or has a ratio of cholesterol ester:phosphatidylglycerol that is within 10%, 20%, 30%, 40%, or 50% of the ratio of cholesterol ester:phosphatidylglycerol in the source cell; or has a ratio of cholesterol ester:phosphatidylinositol that is within 10%, 20%, 30%, 40%, or 50% of the ratio of cholesterol ester:phosphatidylinositol in the source cell; or has a ratio of cholesterol ester:triacylglycerol that is within 10%, 20%, 30%, 40%, or 50% of the ratio of cholesterol ester:triacylglycerol in the source cell.

[0714] In some embodiments, the fusosome comprises a proteomic composition similar to that of the source cell, e.g., using an assay of Example 85. In some embodiments, the protein composition of fusosomes are similar to the parental cells from which they are derived. In some embodiments, the fractional content of each of a plurality of categories of proteins is determined as the sum of intensity signals from each category divided by the sum of the intensity signals of all identified proteins in the sample, e.g., as described in Example 85. In some embodiments, the fusosome comprises (or is identified as comprising) varying amounts of compartment-specific proteins relative to parental cells and/or exosomes, e.g., as determined according to the method described in Example 95. In some embodiments, fusosomes are (or are identified as being) depleted with endoplasmic reticulum protein compared to parental cells and exosomes. In some embodiments, fusosomes are (or are identified as being) depleted for exosomal protein compared to exosomes. In some embodiments, fusosomes have (or are identified as having) less than 15%, 20%, or 25% of the protein in the fusosome as being exosomal protein. In some embodiments, fusosomes are (or are identified as being) depleted for mitochondrial protein compared to parental cells. In some embodiments, fusosomes are (or are identified as being)enriched for nuclear protein compared to parental cells. In some embodiments, fusosomes are (or are identified as being) enriched for ribosomal proteins compared to parental cells and exosomes. In some embodiments, at least 0.025%, 0.03%, 0.04%, 0.05%, 0.06%, 0.07%, 0.08%, 0.09%, 0.1%, 1%, 2%, 3%, 4%, 5%, 6%, 7% 8%, 9% or 10% of the protein in the fusosome is ribosomal protein, or about 0.025-0.2%, 0.05-0.15%, 0.06-1.4%, 0.07%-1.3%, 0.08%-1.2%, 0.09%-1.1%, 1%-20%, 3%-15%, 5%-12.5%, 7.5%-11%, or 8.5%-10.5%, or 9%-10% of the protein in the fusosome is ribosomal protein.

[0715] In some embodiments, the fusosome comprises a ratio of lipids to proteins that is within 10%, 20%, 30%, 40%, or 50% of the corresponding ratio in the source cell, e.g., as measured using an assay of Example 38. In embodiments, the fusosome comprises (or is identified as comprising) a ratio of lipid mass to proteins approximately equal to the lipid mass to protein ratio for nucleated cells. In embodiments, the fusosome comprises (or is identified as comprising) a greater lipid:protein ratio than the parental cell. In embodiments, the fusosome comprises (or is identified as comprising) a lipid:protein ratio of about 110%, 115%, 120%, 125%, 130%, 131%, 132%, 132.5%, 133%, 134%, 135%, 140%, 145%, or 150% of the lipid:protein ratio of the parental cell. In some embodiments, the fusosome or fusosome composition has (or is identified as having) a phospholipid:protein ratio of about 100-180, 110-170, 120-160, 130-150, 135-145, 140-142, or 141 μmol/g, e.g., in an assay of Example 81. In some embodiments, the fusosome or fusosome composition has (or is identified as having) a phospholipid:protein ratio that is about 60-90%, 70-80%, or 75% of the corresponding ratio in the source cells, e.g., in an assay of Example 81.

[0716] In some embodiments, the fusosome comprises a ratio of proteins to nucleic acids (e.g., DNA or RNA) that is within 10%, 20%, 30%, 40%, or 50% of the corresponding ratio in the source cell, e.g., as measured using an assay of Example 39. In embodiments, the fusosome comprises (or is identified as comprising) a ratio of protein mass to DNA mass similar to that of a parental cell. In embodiments, the fusosome comprises (or is identified as comprising) a ratio of protein:DNA that is about about 85%, 90%, 95%, 96%, 97%, 98%, 98.2%, 99%, 100%, 101%, 102%, 103%, 104%, 105%, or 110% of the parental cell. In some embodiments, the fusosome comprises a ratio of proteins to DNA that is greater than the corresponding ratio in the source cell, e.g., at least 10%, 20%, 30%, 40%, 50%, 60%, 70%, 80%, or 90% greater, e.g., as measured using an assay of Example 39. In some embodiments, the fusosome or fusosome composition comprises (or is identified as comprising) a ratio of protein:DNA that is about 20-35, 25-30, 26-29, 27-28, or 27.8 g/g, e.g., by an assay of Example 82. In some embodiments, the fusosome or fusosome composition comprises (or is identified as comprising) a ratio of protein:DNA that is within about 1%, 2%, 5%, 10%, or 20% of the corresponding ratio in the source cells, e.g., by an assay of Example 82.

[0717] In some embodiments, the fusosome comprises a ratio of lipids to nucleic acids (e.g., DNA) that is within 10%, 20%, 30%, 40%, or 50% of the corresponding ratio in the source cell, e.g., as measured using an assay of Example 89. In some embodiments, the fusosome or fusosome composition comprises (or is identified as comprising) a ratio of lipids:DNA that is about 2.0-6.0, 3.0-5.0, 3.5-4.5, 3.8-4.0, or 3.92 mol/mg, e.g., by an assay of Example 83. In some embodiments, the fusosome comprises a ratio of lipids to nucleic acids (e.g., DNA) that is greater than the corresponding ratio in the source cell, e.g., at least 10%, 20%, 30%, 40%, 50%, 60%, 70%, 80%, or 90% greater, e.g., as measured using an assay of Example 89. In embodiments, the fusosome comprises (or is identified as comprising) a greater lipid:DNA ratio than the parental cell. In embodiments, the fusosome comprises about a 105%, 110%, 115%, 120%, 125%, 130%, 135%, 140%, 145%, 150%, or greater lipid:DNA ratio compared to the parental cell.

[0718] In some embodiments, the fusosome composition has a half-life in a subject, e.g., in a mouse, that is within 1%, 2%, 3%, 4%, 5%, 10%, 20%, 30%, 40%, 50%, 60%, 70%, 80%, 90%, 100% of the half life of a reference cell composition, e.g., the source cell, e.g., by an assay of Example 58. In some embodiments, the fusosome composition has a half-life in a subject, e.g., in a mouse, that is at least 1 hour, 2 hours, 3 hours, 4 hours, 5 hours, 6 hours, 12 hours, or 24 hours, e.g., in a human subject or in a mouse, e.g., by an assay of Example 58. In embodiments, the fusosome composition has a half-life of at least 1, 2, 4, 6, 12, or 24 hours in a subject, e.g., in an assay of Example 77. In some embodiments, the therapeutic agent has a half-life in a subject that is longer than the half-life of the fusosome composition, e.g., by at least 10%, 20%, 50%, 2-fold, 5-fold, or 10-fold. For instance, the fusosome may deliver the therapeutic agent to the target cell, and the therapeutic agent may be present after the fusosome is no longer present or detectable.

[0719] In some embodiments, the fusosome transports glucose (e.g., labeled glucose, e.g., 2-NBDG) across a membrane, e.g., by at least 1%, 2%, 3%, 4%, 5%, 10%, 20%, 30%, 40%, 50%, 60%, 70%, 80%, 90%, 100% more than a negative control, e.g., an otherwise similar fusosome in the absence of glucose, e.g., as measured using an assay of Example 48. In some embodiments, the fusosome transports (or is identified as transporting) glucose (e.g., labeled glucose, e.g., 2-NBDG) across a membrane at a greater level than otherwise similar fusosomes treated with phloretin, e.g., in an assay of Example 70. In embodiments, a fusosome not treated with phloretin transports (or is identified as not transporting) glucose at a level at least 1%, 2%, 3%, 5%, or 10% higher (and optionally up to 15% higher) than an otherwise similar fusosome treated with phloretin, e.g., in an assay of Example 70. In some embodiments, the fusosome comprises esterase activity in the lumen that is within 1%, 2%, 3%, 4%, 5%, 10%, 20%, 30%, 40%, 50%, 60%, 70%, 80%, 90%, or 100% of that of the esterase activity in a reference cell, e.g., the source cell or a mouse embryonic fibroblast, e.g., using an assay of Example 49. In some embodiments, the fusosome comprises (or is identified as comprising) esterase activity in the lumen that is at least 10-fold, 20-fold, 50-fold, 100-fold, 200-fold, 500-fold, 1000-fold, 2000-fold, or 5000-fold higher than an unstained control, e.g., by an assay of Example 71. In some embodiments, the fusosome comprises (or is identified as comprising) esterase activity in the lumen that is about 10-100-fold lower than that of the source cells, e.g., by an assay of Example 71. In some embodiments, the fusosome comprises (or is identified as comprising) an acetylcholinesterase activity of about 1E5-1E6, 6E5-8E5, 6.5E5-7E5, or 6.83E5 exosome equivalents, e.g., by an assay of Example 72. In some embodiments, the fusosome comprises a metabolic activity level (e.g., citrate synthase activity) that is within 1%, 2%, 3%, 4%, 5%, 10%, 20%, 30%, 40%, 50%, 60%, 70%, 80%, 90%, or 100% of the metabolic activity level in a reference cell, e.g., the source cell, e.g., as described in Example 51. In some embodiments, the fusosome comprises a metabolic activity level (e.g., citrate synthase activity) that is at least 1%, 2%, 3%, 4%, 5%, 10%, 20%, 30%, 40%, 50%, 60%, 70%, 80%, 90%, or 100% of the metabolic activity level in a reference cell, e.g., the source cell, e.g., as described in Example 51. In some embodiments, the fusosome comprises (or is identified as comprising) a citrate synthase activity that is about 1E-2-2 E-2, 1.3E-2-1.8E-2, 1.4E-2-1.7E-2, 1.5E-2-1.6E-2, or 1.57E-2 umol/ug fusosome/min, e.g., by an assay of Example 73. In some embodiments, the fusosome comprises a respiration level (e.g., oxygen consumption rate), e.g., basal, uncoupled, or maximal respiration level, that is within 1%, 2%, 3%, 4%, 5%, 10%, 20%, 30%, 40%, 50%, 60%, 70%, 80%, 90%, or 100% of the respiration level in a reference cell, e.g., the source cell, e.g., as described in Example 52. In some embodiments, the fusosome comprises a respiration level (e.g., oxygen consumption rate), e.g., basal, uncoupled, or maximal respiration level, that is at least 1%, 2%, 3%, 4%, 5%, 10%, 20%, 30%, 40%, 50%, 60%, 70%, 80%, 90%, or 100% of the respiration level in a reference cell, e.g., the source cell, e.g., as described in Example 52. In embodiments, the fusosome comprises (or is identified as comprising) a basal respiration rate of about 8-15, 9-14, 10-13, 11-12, or 11.3 pmol/min/20 μg fusosome, e.g., by an assay of Example 74. In embodiments, the fusosome comprises (or is identified as comprising) an uncoupled respiration rate of about 8-13, 9-12, 10-11, 10-10.2, or 10.1 pmol/min/20 μg fusosome, e.g., by an assay of Example 74. In embodiments, the fusosome comprises (or is identified as comprising) a maximal respiration rate of about 15-25, 16-24, 17-23, 18-22, 19-21, or 20 pmol/min/20 μg fusosome, e.g., by an assay of Example 74. In embodiments, the fusosome has (or is identified as having) a higher basal respiration rate than uncoupled respiration rate, e.g., by about 1%, 2%, 5%, or 10%, e.g., up to about 15%, e.g., by an assay of Example 74. In embodiments, the fusosome has (or is identified as having) a higher maxaimal respiration rate than basal respiration rate, e.g., by about 1%, 2%, 5%, 10%, 20%, 30%, 40%, 50%, 60%, 70%, 80%, or 90%, e.g., by an assay of Example 74. In some embodiments, the fusosome comprises an Annexin-V staining level of at most 18,000, 17,000, 16,000, 15,000, 14,000, 13,000, 12,000, 11,000, or 10,000 MFI, e.g., using an assay of Example 53, or wherein the fusosome comprises an Annexin-V staining level at least 5%, 10%, 20%, 30%, 40%, 50%, 60%, 70%, 80%, or 90% lower than the Annexin-V staining level of an otherwise similar fusosome treated with menadione in the assay of Example 53, or wherein the fusosome comprises an Annexin-V staining level at least 5%, 10%, 20%, 30%, 40%, 50%, 60%, 70%, 80%, or 90% lower than the Annexin-V staining level of a macrophage treated with menadione in the assay of Example 53. In embodiments, the fusosome comprises (or is identified as comprising) an Annexin V-staining level that is at least about 1%, 2%, 5%, or 10% lower than the Annexin V-staining level of an otherwise similar fusosome treated with antimycin A, e.g., in an assay of Example 75. In embodiments, the fusosome comprises (or is identified as comprising) an Annexin V-staining level that is within about 1%, 2%, 5%, or 10% of the Annexin V-staining level of an otherwise similar fusosome treated with antimycin A, e.g., in an assay of Example 75.

[0720] In some embodiments, the fusosome has a miRNA content level of at least at least 1%, 2%, 3%, 4%, 5%, 10%, 20%, 30%, 40%, 50%, 60%, 70%, 80%, 90%, or greater than that of the source cell, e.g., by an assay of Example 31. In some embodiments, the fusosome has a miRNA content level of at least 1%, 2%, 3%, 4%, 5%, 10%, 20%, 30%, 40%, 50%, 60%, 70%, 80%, 90%, or greater of the miRNA content level of the source cell (e.g., up to 100% of the miRNA content level of the source cell), e.g., by an assay of Example 31. In some embodiments, the fusosome has a total RNA content level of at least 1%, 2%, 3%, 4%, 5%, 10%, 20%, 30%, 40%, 50%, 60%, 70%, 80%, 90%, or greater of the total RNA content level of the source cell (e.g., up to 100% of the total RNA content level of the source cell), e.g., as measured by an assay of Example 64.

[0721] In some embodiments, the fusosome has a soluble:non-soluble protein ratio is within 1%, 2%, 3%, 4%, 5%, 10%, 20%, 30%, 40%, 50%, 60%, 70%, 80%, 90%, or greater than that of the source cell, e.g., within 1%-2%, 2%-3%, 3%-4%, 4%-5%, 5%-10%, 10%-20%, 20%-30%, 30%-40%, 40%-50%, 50%-60%, 60%-70%, 70%-80%, or 80%-90% of that of the source cell, e.g., by an assay of Example 36. In embodiments, the fusosome has a soluble:non-soluble protein ratio of about 0.3-0.8, 0.4-0.7, or 0.5-0.6, e.g., about 0.563, e.g., by an assay of Example 36. In some embodiments, the population of fusosomes has (or is identified as having) a soluble:insoluble protein mass ratio of about 0.3-0.8, 0.4-0.7, 0.5-0.6, or 0.563, or greater than about 0.1, 0.2, 0.3, 0.4, or 0.5. In some embodiments, the population of fusosomes has (or is identified as having) a soluble:insoluble protein mass ratio that is greater than that of the source cells, e.g., at least 2-fold, 3-fold, 4-fold, 5-fold, 10-fold, or 20-fold higher. In embodiments, the soluble:insoluble protein mass ratio is determined by an assay of Example 68. In embodiments, the soluble:insoluble protein mass ratio is (or is identified as being) lower in the fusosome population than in the parental cells. In embodiments, when the ratio of fusosomes to parental cells is (or is identified as being) about 3%, 4%, 5%, 6%, 7%, or 8%, the soluble:insoluble ratio of the population of fusosomes is (or is identified as being) about equal to the soluble:insoluble ratio of the parental cells.

[0722] In some embodiments, the fusosome has an LPS level less than 5%, 1%, 0.5%, 0.01%, 0.005%, 0.0001%, 0.00001% or less of the LPS content of the source cell, e.g., as measured by mass spectrometry, e.g., in an assay of Example 37. In some embodiments, the fusosome is capable of signal transduction, e.g., transmitting an extracellular signal, e.g., AKT phosphorylation in response to insulin, or glucose (e.g., labeled glucose, e.g., 2-NBDG) uptake in response to insulin, e.g., by at least 1%, 2%, 3%, 4%, 5%, 10%, 20%, 30%, 40%, 50%, 60%, 70%, 80%, 90%, 100% more than a negative control, e.g., an otherwise similar fusosome in the absence of insulin, e.g., using an assay of Example 47. In some embodiments, the fusosome targets a tissue, e.g., liver, lungs, heart, spleen, pancreas, gastrointestinal tract, kidney, testes, ovaries, brain, reproductive organs, central nervous system, peripheral nervous system, skeletal muscle, endothelium, inner ear, or eye, when administered to a subject, e.g., a mouse, e.g., wherein at least 0.1%, 0.5%, 1%, 1.5%, 2%, 2.5%, 3%, 4%, 5%, 10%, 15%, 20%, 25%, 30%, 35%, 40%, 50%, 60%, 70%, 80%, or 90% of the fusosomes in a population of administered fusosomes are present in the target tissue after 24, 48, or 72 hours, e.g., by an assay of Example 62. In some embodiments, the fusosome has a juxtacrine-signaling level of at least 1%, 2%, 3%, 4%, 5%, 10%, 20%, 30%, 40%, 50%, 60%, 70%, 80%, 90%, or 100% greater than the level of juxtacrine signaling induced by a reference cell, e.g., the source cell or a bone marrow stromal cell (BMSC), e.g., by an assay of Example 54. In some embodiments, the fusosome has a juxtacrine-signaling level of at least 1%, 2%, 3%, 4%, 5%, 10%, 20%, 30%, 40%, 50%, 60%, 70%, 80%, or 90% (e.g., up to 100%) of the level of juxtacrine signaling induced by a reference cell, e.g., the source cell or a bone marrow stromal cell (BMSC), e.g., by an assay of Example 54. In some embodiments, the fusosome has a paracrine-signaling level of at least 1%, 2%, 3%, 4%, 5%, 10%, 20%, 30%, 40%, 50%, 60%, 70%, 80%, 90%, 100% greater than the level of paracrine signaling induced by a reference cell, e.g., the source cell or a macrophage, e.g., by an assay of Example 55. In some embodiments, the fusosome has a paracrine-signaling level of at least 1%, 2%, 3%, 4%, 5%, 10%, 20%, 30%, 40%, 50%, 60%, 70%, 80%, or 90% (e.g., up to 100%) of the level of paracrine signaling induced by a reference cell, e.g., the source cell or a macrophage, e.g., by an assay of Example 55. In some embodiments, the fusosome polymerizes actin at a level within 1%, 2%, 3%, 4%, 5%, 10%, 20%, 30%, 40%, 50%, 60%, 70%, 80%, 90%, or 100% compared to the level of polymerized actin in a reference cell, e.g., the source cell or a C2C12 cell, e.g., by the assay of Example 56. In some embodiments, the fusosome polymerizes actin (or is identified as polymerizing actin) at a level that is constant over time, e.g, over at least 3, 5, or 24 hours, e.g., by an assay of Example 79. In embodiments, the level of actin polymerization changes by less than 1%, 2%, 5%, 10%, or 20% over a 5-hour period, e.g. by the assay of Example 79. In some embodiments, the fusosome has a membrane potential within about 1%, 2%, 3%, 4%, 5%, 10%, 20%, 30%, 40%, 50%, 60%, 70%, 80%, 90%, 100% of the membrane potential of a reference cell, e.g., the source cell or a C2C12 cell, e.g., by an assay of Example 57, or wherein the fusosome has a membrane potential of about −20 to ˜150 mV, −20 to −50 mV, −50 to −100 mV, or −100 to −150 mV, or wherein the fusosome has a membrane potential of less than −1 mv, −5 mv, −10 mv, −20 mv, −30 mv, −40 mv, −50 mv, −60 mv, −70 mv, −80 mv, −90 mv, −100 mv. In some embodiments, the fusosome has (or is identified as having) a membrane potential of about −25 to −35, −27 to −32, −28 to −31, −29 to −30, or −29.6 millivolts, e.g., in an assay of Example 76. In some embodiments, the fusosome is capable of extravasation from blood vessels, e.g., at a rate at least 1%, 2%, 5%, 10%, 20%, 30%, 40%, 50%, 60%, 70%, 80%, or 90% the rate of extravasation of the source cell, e.g., using an assay of Example 42, e.g., wherein the source cell is a neutrophil, lymphocyte, B cell, macrophage, or NK cell. In some embodiments, the fusosome is capable of chemotaxis, e.g., of at least 1%, 2%, 3%, 4%, 5%, 10%, 20%, 30%, 40%, 50%, 60%, 70%, 80%, or 90% (e.g., up to 100%) compared to a reference cell, e.g., a macrophage, e.g., using an assay of Example 43. In some embodiments, the fusosome is capable of phagocytosis, e.g., at least 1%, 2%, 3%, 4%, 5%, 10%, 20%, 30%, 40%, 50%, 60%, 70%, 80%, or 90% (e.g., up to 100%) compared to a reference cell, e.g., a macrophage, e.g., using an assay of Example 45. In some embodiments, the fusosome is capable of crossing a cell membrane, e.g., an endothelial cell membrane or the blood brain barrier. In some embodiments, the fusosome is capable of secreting a protein, e.g., at a rate at least 1%, 2%, 3%, 4%, 5%, 10%, 20%, 30%, 40%, 50%, 60%, 70%, 80%, 90%, or 100% greater than a reference cell, e.g., a mouse embryonic fibroblast, e.g., using an assay of Example 46. In some embodiments, the fusosome is capable of secreting a protein, e.g., at a rate at least 1%, 2%, 3%, 4%, 5%, 10%, 20%, 30%, 40%, 50%, 60%, 70%, 80%, or 90% (e.g., up to 100%) compared to a reference cell, e.g., a mouse embryonic fibroblast, e.g., using an assay of Example 46.

[0723] In some embodiments, the fusosome is not capable of transcription or has transcriptional activity of less than 1%, 2.5% 5%, 10%, 20%, 30%, 40%, 50%, 60%, 70%, 80%, or 90% of that of the transcriptional activity of a reference cell, e.g., the source cell, e.g., using an assay of Example 22. In some embodiments, the fusosome is not capable of nuclear DNA replication or has nuclear DNA replication of less than 1%, 2.5% 5%, 10%, 20%, 30%, 40%, 50%, 60%, 70%, 80%, or 90% of the nuclear DNA replication of a reference cell, e.g., the source cell, e.g., using an assay of Example 23. In some embodiments, the fusosome lacks chromatin or has a chromatin content of less than 1%, 2.5% 5%, 10%, 20%, 30%, 40%, 50%, 60%, 70%, 80%, or 90% of the of the chromatin content of a reference cell, e.g., the source cell, e.g., using an assay of Example 30.

[0724] In some embodiments, a characteristic of a fusosome is described by comparison to a reference cell. In embodiments, the reference cell is the source cell. In embodiments, the reference cell is a HeLa, HEK293, HFF-1, MRC-5, WI-38, IMR 90, IMR 91, PER.C6, HT-1080, or BJ cell. In some embodiments, a characteristic of a population of fusosomes is described by comparison to a population of reference cells, e.g., a population of source cells, or a population of HeLa, HEK293, HFF-1, MRC-5, WI-38, IMR 90, IMR 91, PER.C6, HT-1080, or BJ cells.

[0725] In some embodiments, the fusosome meets a pharmaceutical or good manufacturing practices (GMP) standard. In some embodiments, the fusosome was made according to good manufacturing practices (GMP). In some embodiments, the fusosome has a pathogen level below a predetermined reference value, e.g., is substantially free of pathogens. In some embodiments, the fusosome has a contaminant level below a predetermined reference value, e.g., is substantially free of contaminants. In some embodiments, the fusosome has low immunogenicity, e.g., as described herein.

[0726] In some embodiments, immunogenicity of a fusosome composition is assayed by a serum inactivation assay (e.g., an assay that detects antibody-mediated neutralization or complement mediated degradation). In some embodiments, fusosomes are not inactivated by serum, or are inactivated at a level below a predetermined value. In some embodiments, serum of a fusosome-naïve subject (e.g., human or mouse) is contacted with a test fusosome composition. In some embodiments, the serum of a subject that has received one or more administrations of fusosomes, e.g., has received at least two administrations of fusosomes, is contacted with the test fusosome composition. In embodiments, serum-exposed fusosomes are then tested for ability to deliver a cargo to target cells. In some embodiments, the percent of cells that detectably comprise the cargo after treatment with serum-incubated fusosomes is at least 50%, 60%, 70%, 80%, 90%, or 95% the percent of cells that detectably comprise the cargo after treatment with positive control fusosomes not contacted with serum. In some embodiments, serum inactivation is measured using an assay of Example 97.

[0727] In some embodiments, immunogenicity of a fusosome composition is assayed by detecting complement activation in response to the fusosomes. In some embodiments, the fusosomes do not activate complement, or activate complement at a level below a predetermined value. In some embodiments, serum of a fusosome-naïve subject (e.g., human or mouse) is contacted with a test fusosome composition. In some embodiments, the serum of a subject that has received one or more administrations of fusosomes, e.g., has received at least two administrations of fusosomes, is contacted with the test fusosome composition. In embodiments, the composition comprising serum and fusosomes is then tested for an activated complement factor (e.g., C3a), e.g., by ELISA. In some embodiments, a fusosome comprising a modification described herein (e.g., elevated levels of a complement regulatory protein compared to a reference cell) undergoes reduced complement activation compared to an otherwise similar fusosome that lacks the modification, e.g., reduced by at least 5%, 10%, 20%, 30%, 40%, 50%, 60%, 70%, 80%, 90%, 95%, 98%, or 99%. In some embodiments, complement activation is measured using an assay of Example 98.

[0728] In some embodiments, a fusosome or population of fusosomes will not be substantially inactivated by serum. In some embodiments, a fusosome or population of fusosomes is resistant to serum inactivation, e.g., as quantified according to the method described in Example 97. In embodiments, the fusosome or population of fusosomes is not substantially inactivated by serum or is resistant to serum inactivation following multiple administrations of the fusosome or population of fusosomes to a subject, e.g., according to the methods described herein. In some embodiments, a fusosome is modified to have a reduced serum inactivation, e.g., compared to a corresponding unmodified fusosome, e.g., following multiple administrations of the modified fusosome, e.g., as quantified according to the method described in Example 97.

[0729] In some embodiments, a fusosome does not substantially induce complement activity, e.g., as measured according to the method described in Example 98. In some embodiments, a fusosome is modified to induce reduced complement activity compared to a corresponding unmodified fusosome. In embodiments, complement activity is measured by determining expression or activity of a complement protein (e.g., DAF, proteins that bind decay-accelerating factor (DAF, CD55), e.g., factor H (FH)-like protein-1 (FHL-1), C4b-binding protein (C4BP), complement receptor 1 (CD35), Membrane cofactor protein (MCP, CD46), Profectin (CD59), proteins that inhibit the classical and alternative complement pathway CD/C5 convertase enzymes, or proteins that regulate MAC assembly) in a cell.

[0730] In some embodiments, the source cell is an endothelial cell, a fibroblast, a blood cell (e.g., a macrophage, a neutrophil, a granulocyte, a leukocyte), a stem cell (e.g., a mesenchymal stem cell, an umbilical cord stem cell, bone marrow stem cell, a hematopoietic stem cell, an induced pluripotent stem cell e.g., an induced pluripotent stem cell derived from a subject's cells), an embryonic stem cell (e.g., a stem cell from embryonic yolk sac, placenta, umbilical cord, fetal skin, adolescent skin, blood, bone marrow, adipose tissue, erythropoietic tissue, hematopoietic tissue), a myoblast, a parenchymal cell (e.g., hepatocyte), an alveolar cell, a neuron (e.g., a retinal neuronal cell) a precursor cell (e.g., a retinal precursor cell, a myeloblast, myeloid precursor cells, a thymocyte, a meiocyte, a megakaryoblast, a promegakaryoblast, a melanoblast, a lymphoblast, a bone marrow precursor cell, a normoblast, or an angioblast), a progenitor cell (e.g., a cardiac progenitor cell, a satellite cell, a radial gial cell, a bone marrow stromal cell, a pancreatic progenitor cell, an endothelial progenitor cell, a blast cell), or an immortalized cell (e.g., HeLa, HEK293, HFF-1, MRC-5, WI-38, IMR 90, IMR 91, PER.C6, HT-1080, or BJ cell). In some embodiments, the source cell is other than a 293 cell, HEK cell, human endothelial cell, or a human epithelial cell, monocyte, macrophage, dendritic cell, or stem cell.

[0731] In some embodiments, the source cell expresses (e.g., overexpresses) ARRDC1 or an active fragment or variant thereof. In some embodiments, the fusosome or fusosome composition has a ratio of fusogen to ARRDC1 of about 1-3, 1-10, 1-100, 3-10, 4-9, 5-8, 6-7, 15-100, 60-200, 80-180, 100-160, 120-140, 3-100, 4-100, 5-100, 6-100, 15-100, 80-100, 3-200, 4-200, 5-200, 6-200, 15-200, 80-200, 100-200, 120-200, 300-1000, 400-900, 500-800, 600-700, 640-690, 650-680, 660-670, 100-10,000, or about 664.9, e.g., by a mass spectrometry assay. In some embodiments, the level of ARRDC1 as a percentage of total protein content is at least about 0.01%, 0.02%, 0.03%, 0.04%, 0.05%; 0.1%, 0.15%, 0.2%, 0.25%; 0.5%, 1%, 2%, 3%, 4%, 5%; or the level of ARRDC1 as a percentage of total protein content is about 0.05-1.5%, 0.1%-0.3%, 0.05-0.2%, 0.1-0.2%, 0.25-7.5%, 0.5%-1.5%, 0.25-1%, 0.5-1%, 0.05-1.5%, 10%-30%, 5-20%, or 10-20%, e.g., by mass spectrometry, e.g., as measured according to the method described in Example 96. In some embodiments, the fusosome or fusosome composition has a ratio of fusogen to TSG101 of about 100-1,000, 100-400, 100-500, 200-400, 200-500, 200-1,000, 300-400, 1,000-10,000, 2,000-5,000, 3,000-4,000, 3,050-3,100, 3,060-3,070, or about 3,064, 10,000-100,000, 10,000-200,000, 10,000-500,000, 20,000-500,000, 30,000-400,000, e.g., using a mass spectrometry assay, e.g., an assay of Example 92. In some embodiments, the fusosome or fusosome composition has a ratio of cargo to tsg101 of about 1-3, 1-30, 1-20, 1-25, 1.5-30, 10-30, 15-25, 18-21, 19-20, 10-300, 10-200, 15-300, 15-200, 100-300, 100-200, 150-300, or about 19.5, e.g., using a mass spectrometry assay, e.g., an assay of Example 93. In some embodiments, the level of TSG101 as a percentage of total protein content is at least about 0.0001%, 0.0002%, 0.0003%, 0.0004%, 0.0005%, 0.0006%, 0.0007%, 0.001%, 0.002%, 0.003%, 0.004%, 0.005%, 0.006%, 0.007%; 0.01%, 0.02%, 0.03%, 0.04%, 0.05%, 0.06%, 0.07%; or the level of TSG101 as a percentage of total protein content is about 0.0001-0.001, 0.0001-0.002, 0.0001-0.01, 0.0001-0.1, 0.001-0.01, 0.002-0.006, 0.003-0.005, 0.001-0.1, 0.01-0.1, 0.02-0.06, 0.03-0.05, or 0.004, e.g., by mass spectrometry, e.g., as measured according to the method described in Example 96.

[0732] In some embodiments, the fusosome comprises a cargo, e.g., a therapeutic agent, e.g., an endogenous therapeutic agent or an exogenous therapeutic agent. In some embodiments, the therapeutic agent is chosen from one or more of a protein, e.g., an enzyme, a transmembrane protein, a receptor, an antibody; a nucleic acid, e.g., DNA, a chromosome (e.g. a human artificial chromosome), RNA, mRNA, siRNA, miRNA, or a small molecule. In some embodiments, the therapeutic agent is an organelle other than a mitochondrion, e.g., an organelle selected from: nucleus, Golgi apparatus, lysosome, endoplasmic reticulum, vacuole, endosome, acrosome, autophagosome, centriole, glycosome, glyoxysome, hydrogenosome, melanosome, mitosome, cnidocyst, peroxisome, proteasome, vesicle, and stress granule. In some embodiments, the organelle is a mitochondrion.

[0733] In some embodiments, the fusosome enters the target cell by endocytosis, e.g., wherein the level of therapeutic agent delivered via an endocytic pathway is 0.01-0.6, 0.01-0.1, 0.1-0.3, or 0.3-0.6, or at least 1%, 2%, 3%, 4%, 5%, 10%, 20%, 30%, 40%, 50%, 60%, 70%, 80%, 90% or greater than a chloroquine treated reference cell contacted with similar fusosomes, e.g., using an assay of Example 60. In some embodiments, at least 1%, 2%, 3%, 4%, 5%, 10%, 20%, 30%, 40%, 50%, 60%, 70%, 80%, 90% of fusosomes in a fusosome composition that enter a target cell enter via a non-endocytic pathway, e.g., the fusosomes enter the target cell via fusion with the cell surface. In some embodiments, the level of a therapeutic agent delivered via a non-endocytic pathway

[0734] for a given fusosome is 0.1-0.95, 0.1-0.2, 0.2-0.3, 0.3-0.4, 0.4-0.5, 0.5-0.6, 0.6-0.7, 0.7-0.8, 0.8-0.9, 0.9-

[0735] 0.95, or at least at least 1%, 2%, 3%, 4%, 5%, 10%, 20%, 30%, 40%, 50%, 60%, 70%, 80%, 90% or

[0736] greater than a chloroquine treated reference cell, e.g., using an assay of Example 59. In some embodiments, at least 1%, 2%, 3%, 4%, 5%, 10%, 20%, 30%, 40%, 50%, 60%, 70%, 80%, 90% of fusosomes in a fusosome composition that enter a target cell enter the cytoplasm (e.g., do not enter an endosome or lysosome). In some embodiments, less than 90%, 80%, 70%, 60%, 50%, 40%, 30%, 20%, 10%, 5%, 4%, 3%, 2%, or 1% of fusosomes in a fusosome composition that enter a target cell enter an endosome or lysosome. In some embodiments, the fusosome enters the target cell by a non-endocytic pathway, e.g., wherein the level of therapeutic agent delivered is at least 90%, 95%, 98%, or 99% that of a chloroquine treated reference cell, e.g., using an assay of Example 60. In an embodiment, a fusosome delivers an agent to a target cell via a dynamin mediated pathway. In an embodiment, the level of agent delivered via a dynamin mediated pathway is in the range of 0.01-0.6, or at least 1%, 2%, 3%, 4%, 5%, 10%, 20%, 30%, 40%, 50%, 60%, 70%, 80%, 90% or greater than Dynasore treated target cells contacted with similar fusosomes, e.g., as measured in an assay of Example 61. In an embodiment, a fusosome delivers an agent to a target cell via macropinocytosis. In an embodiment, the level of agent delivered via macropinocytosis is in the range of 0.01-0.6, or at least 1%, 2%, 3%, 4%, 5%, 10%, 20%, 30%, 40%, 50%, 60%, 70%, 80%, 90% or greater than EIPA treated target cells contacted with similar fusosomes, e.g., as measured in an assay of Example 61. In an embodiment, a fusosome delivers an agent to a target cell via an actin-mediated pathway. In an embodiment, the level of agent delivered via an actin-mediated pathway will be in the range of 0.01-0.6, or at least 1%, 2%, 3%, 4%, 5%, 10%, 20%, 30%, 40%, 50%, 60%, 70%, 80%, 90% or greater than Latrunculin B treated target cells contacted with similar fusosomes, e.g., as measured in an assay of Example 61.

[0737] In some embodiments, the fusosome has a density of <1, 1-1.1, 1.05-1.15, 1.1-1.2, 1.15-1.25, 1.2-1.3, 1.25-1.35, or >1.35 g/ml, e.g., by an assay of Example 28.

[0738] In some embodiments, the fusosome composition comprises less than 0.01%, 0.05%, 0.1%, 0.5%, 1%, 1.5%, 2%, 2.5%, 3%, 4%, 5%, or 10% source cells by protein mass or less than 0.01%, 0.05%, 0.1%, 0.5%, 1%, 1.5%, 2%, 2.5%, 3%, 4%, 5%, or 10% of cells have a functional nucleus. In some embodiments, at least 10%, 20%, 30%, 40%, 50%, 60%, 70%, 80%, 90%, 95%, or 99% of fusosomes in the fusosome composition comprise an organelle, e.g., a mitochondrion.

[0739] In some embodiments, the fusosome further comprises an exogenous therapeutic agent. In some embodiments, the exogenous therapeutic agent is chosen from one or more of a protein, e.g., an enzyme, a transmembrane protein, a receptor, an antibody; a nucleic acid, e.g., DNA, a chromosome (e.g. a human artificial chromosome), RNA, mRNA, siRNA, miRNA, or a small molecule.

[0740] In embodiments, the fusosome enters the cell by endocytosis or a non-endocytic pathway.

[0741] In embodiments, the fusosome composition is stable at a temperature of less than 4 C for at least 1, 2, 3, 6, or 12 hours; 1, 2, 3, 4, 5, or 6 days; 1, 2, 3, or 4 weeks; 1, 2, 3, or 6 months; or 1, 2, 3, 4, or 5 years. In embodiments, the fusosome composition is stable at a temperature of less than −20 C for at least 1, 2, 3, 6, or 12 hours; 1, 2, 3, 4, 5, or 6 days; 1, 2, 3, or 4 weeks; 1, 2, 3, or 6 months; or 1, 2, 3, 4, or 5 years. In embodiments, the fusosome composition is stable at a temperature of less than −80 C for at least 1, 2, 3, 6, or 12 hours; 1, 2, 3, 4, 5, or 6 days; 1, 2, 3, or 4 weeks; 1, 2, 3, or 6 months; or 1, 2, 3, 4, or 5 years.

[0742] In embodiments, the fusosome has a size, or the population of fusosomes has an average size, within about 0.01%, 0.05%, 0.1%, 0.5%, 1%, 2%, 3%, 4%, 5%, 10%, 20%, 30%, 40%, 50%, 60%, 70%, 80%, 90%, of that of the source cell, e.g., as measured by an assay of Example 25. In embodiments, the fusosome has a size, or the population of fusosomes has an average size, that is less than about 0.01%, 0.05%, 0.1%, 0.5%, 1%, 2%, 3%, 4%, 5%, 10%, 20%, 30%, 40%, 50%, 60%, 70%, 80%, 90%, of that of the source cell, e.g., as measured by an assay of Example 25. In embodiments, the fusosomes have (or are identified as having) a size less than parental cells. In embodiments, the fusosomes have (or are identified as having) a size within about 50%, 60%, 65%, 70%, 71%, 72%, 73%, 74%, 75%, 80%, or 90% of parental cells. In embodiments, the fusosomes have (or are identified as having) less than about 70%, 60%, 50%, 40%, 30%, 20%, 10%, 5%, 1%, or less of the parental cell's variability in size distribution, e.g., within about 90% of the sample. In embodiments, the fusosomes have (or are identified as having) about 40%, 45%, 50%, 55%, 56%, 57%, 58%, 59%, 60%, 65%, or 70% less of the parental cell's variability in size distribution, e.g., within about 90% of the sample. In some embodiments, fusosomes have (or are identified as having) an average size of greater than 30, 35, 40, 45, 50, 55, 60, 65, or 70 nm in diameter. In embodiments, fusosomes have an average size of about 100, 110, 120, 125, 126, 127, 128, 129, 130, 131, 132, 133, 134, 135, 140, or 150 nm in diameter. In embodiments, the fusosome has a size, or the population of fusosomes has an average size, within about 0.01%-0.05%, 0.05%-0.1%, 0.1%-0.5%, 0.5%-1%, 1%-2%, 2%-3%, 3%-4%, 4%-5%, 5%-10%, 10%-20%, 20%-30%, 30%-40%, 40%-50%, 50%-60%, 60%-70%, 70%-80%, or 80%-90% the size of the source cell, e.g., as measured by an assay of Example 25. In embodiments, the fusosome has a size, or the population of fusosomes has an average size, that is less than about 0.01%-0.05%, 0.05%-0.1%, 0.1%-0.5%, 0.5%-1%, 1%-2%, 2%-3%, 3%-4%, 4%-5%, 5%-10%, 10%-20%, 20%-30%, 30%-40%, 40%-50%, 50%-60%, 60%-70%, 70%-80%, or 80%-90% of the size of the source cell, e.g., as measured by an assay of Example 25. In embodiments, the fusosome has a diameter, or the population of fusosomes has an average diameter, of less than about 500 nm (e.g., less than about 10, 50, 100, 150, 200, 250, 300, 350, 400, or 450 nm), e.g., as measured by an assay of Example 67. In embodiments, the fusosome has a diameter, or the population of fusosomes has an average diameter, of about 80-180, 90-170, 100-160, 110-150, 120-140, or 130 nm, e.g., as measured by an assay of Example 67. In embodiments, the fusosome has a diameter, or the population of fusosomes has an average diameter, of between about 11,000 nm and 21,000 nm, e.g., as measured by an assay of Example 67. In embodiments, the fusosome has a diameter, or the population of fusosomes has an average diameter, between about 10-22,000, 12-20,000, 14-18,720 nm, 20-16,000 nm, e.g., as measured by an assay of Example 67. In embodiments, the fusosome has a volume, or the population of fusosomes has an average volume, of about 0.01-0.1 μm³, 0.02-1 μm³, 0.03-1 μm³, 0.04-1 μm³, 0.05-0.09 μm³, 0.06-0.08 μm³, 0.07 μm³, e.g., as measured by an assay of Example 67. In embodiments, the fusosome has a diameter, or the population of fusosomes has an average diameter, of at least about 10 nm, 20 nm, 30 nm, 40 nm, 50 nm, 60 nm, 70 nm, 80 nm, 90 nm, 100 nm, 150 nm, 200 nm, or 250 nm e.g., as measured by an assay of Example 27. In embodiments, the fusosome has a diameter, or the population of fusosomes has an average diameter, of about 10 nm, 20 nm, 30 nm, 40 nm, 50 nm, 60 nm, 70 nm, 80 nm, 90 nm, 100 nm, 150 nm, 200 nm, or 250 nm (e.g., ±20%) e.g., as measured by an assay of Example 27. In embodiments, the fusosome has a diameter, or the population of fusosomes has an average diameter, of at least about 500 nm, 750 nm, 1,000 nm, 1,500 nm, 2,000 nm, 2,500 nm, 3,000 nm, 5,000 nm, 10,000 nm, or 20,000 nm, e.g., as measured by an assay of Example 27. In embodiments, the fusosome has a diameter, or the population of fusosomes has an average diameter, of about 500 nm, 750 nm, 1,000 nm, 1,500 nm, 2,000 nm, 2,500 nm, 3,000 nm, 5,000 nm, 10,000 nm, or 20,000 nm (e.g., ±20%), e.g., as measured by an assay of Example 27. In embodiments, the population of fusosomes has (or is identified as having) one or more of: a 10% quantile diameter of about 40-90 nm, 45-60 nm, 50-55 nm or 53 nm; a 25% quantile diameter of about 70-100 nm, 80-95 nm, 85-90 nm, or 88 nm; a 75% quantile diameter of about 200-250 nm, 210-240 nm, 220-230 nm, or 226 nm; or a 90% quantile of about 4000-5000 nm, 4300-4600 nm, 4400-4500 nm, 4450 nm, e.g., by an assay of Example 66.

[0743] In embodiments, the fusosome composition comprises (or is identified as comprising) a GAPDH concentration of about 35-40, 36-39, 37-38, or 37.2 ng/mL, e.g., in an assay of Example 80. In embodiments, the GAPDH concentration of the fusosome composition is (or is identified as being) within about 1%, 2%, 5%, 10%, or 20% of the GAPDH concentration of the source cells, e.g., in an assay of Example 80. In embodiments, the GAPDH concentration of the fusosome composition is (or is identified as being) at least 1%, 2%, 5%, 10%, or 20% lower than the the GAPDH concentration of the source cells, e.g., in an assay of Example 80. In embodiments, the the fusosome composition comprises (or is identified as comprising) less than about 30, 35, 40, 45, 46, 47, 48, 49, 50, 55, 60, 65, or 70 μg GAPDH per gram total protein. In embodiments, the fusosome composition comprises (or is identified as comprising) less than about 500, 250, 100, or 50 μg GAPDH per gram total protein. In embodiments, the parental cell comprises (or is identified as comprising) at least 1%, 2.5%, 5%, 10%, 15%, 20%, 30%, 30%, 50%, or more GAPDH per total protein than the fusosome composition.

[0744] In embodiments, the average fractional content of calnexin in the fusosome is (or is identified as being) less than about 1×10⁻⁴, 1.5×10⁻⁴, 2×10⁻⁴, 2.1×10⁻⁴, 2.2×10⁻⁴, 2.3×10⁻⁴, 2.4×10⁻⁴, 2.43×10⁻⁴, 2.5×10⁻⁴, 2.6×10⁻⁴, 2.7×10⁻⁴, 2.8×10⁻⁴, 2.9×10⁻⁴, 3×10⁻⁴, 3.5×10⁻⁴, or 4×10⁻⁴. In embodiments, the fusosome comprises an amount of calnexin per total protein that is lower than that of the parental cell by about 70%, 75%, 80%, 85%, 88%, 90%, 95%, 99%, or more.

[0745] In some embodiments, fusosomes comprise or are enriched for lipids that affect membrane curvature (see, e.g., Thiam et al., Nature Reviews Molecular Cell Biology, 14(12): 775-785, 2013). Some lipids have a small hydrophilic head group and large hydrophobic tails, which facilitate the formation of a fusion pore by concentrating in a local region. In some embodiments, fusosomes comprise or are enriched for negative-curvature lipids, such as cholesterol, phosphatidylethanolamine (PE), diglyceride (DAG), phosphatidic acid (PA), fatty acid (FA). In some embodiments, fusosomes do not comprise, are depleted of, or have few positive-curvature lipids, such as lysophosphatidylcholine (LPC), phosphatidylinositol (Ptdlns), lysophosphatidic acid (LPA), lysophosphatidylethanolamine (LPE), monoacylglycerol (MAG).

[0746] In some embodiments, the lipids are added to a fusosome. In some embodiments, the lipids are added to source cells in culture which incorporate the lipids into their membranes prior to or during the formation of a fusosome. In some embodiments, the lipids are added to the cells or fusosomes in the form of a liposome. In some embodiments methyl-betacyclodextrane (mβ-CD) is used to enrich or deplete lipids (see, e.g., Kainu et al, Journal of Lipid Research, 51(12): 3533-3541, 2010).

### VIII. Assessing Fusosome Content of Target Cell

[0747] The present disclosure also provides, in some aspects, a method of assessing fusosome content of a target cell (e.g., fusosome fusion to a target cell) in a subject, comprising providing a biological sample from a subject that has received a fusosome composition (e.g., a fusosome composition described herein), and performing an assay to determine one or more properties of the biological sample resulting from fusion of a target cell in the biological sample with a fusosome as described herein. In some aspects, the disclosure provides a method of measuring fusion with a target cell, e.g., as described in Example 69. In some embodiments, determining one or more properties of the biological sample comprises determining: the presence of a fusogen, the level of a cargo or payload, or an activity relating to a cargo or payload.

[0748] In some aspects, the present disclosure provides a method of assessing fusosome content of a target cell (e.g., fuso some fusion to a target cell) in a subject, comprising providing a biological sample from a subject that has received a fusosome composition, e.g., as described herein, and testing the biological sample for the presence of a fusogen, e.g., a fusogen described herein. In some instances, the level of the fusogen detected is greater (e.g., at least about 5%, 10%, 20%, 30%, 40%, 50%, 60%, 70%, 80%, 90%, 100%, 200%, 300%, 400%, 500%, 600%, 700%, 800%, 900%, 1000%, 2000%, 3000%, 4000%, 5000%, 10,000%, 50,000%, or 100,000% greater) than that observed in a corresponding biological sample from a subject that has not received a fusosome composition. In some embodiments, the subject is the same subject prior to administration of the fusosome composition, and in some embodiments, the subject is a different subject.

[0749] In some aspects, the present disclosure provides a method of assessing fusosome content of a target cell (e.g., fusosome fusion to a target cell) in a subject, comprising providing a biological sample from a subject that has received a fusosome composition, e.g., as described herein, and testing the biological sample for the presence of a cargo or payload, e.g., delivered by a fusosome as described herein. In some instances, the level of the cargo or payload detected is greater (e.g., at least about 5%, 10%, 20%, 30%, 40%, 50%, 60%, 70%, 80%, 90%, 100%, 200%, 300%, 400%, 500%, 600%, 700%, 800%, 900%, 1000%, 2000%, 3000%, 4000%, 5000%, 10,000%, 50,000%, or 100,000% greater) than that observed in a corresponding biological sample from a subject that has not received a fusosome composition. In some embodiments, the subject is the same subject prior to administration of the fusosome composition, and in some embodiments, the subject is a different subject.

[0750] In some aspects, the present disclosure provides a method of assessing fusosome content of a target cell (e.g., fusosome fusion to a target cell in a subject), comprising providing a biological sample from a subject that has received a fusosome composition, e.g., as described herein, and testing the biological sample for alteration of an activity relating to the fusosome composition, e.g., an activity relating to a cargo or payload delivered by the fusosome composition. In some instances, the level of the activity detected is increased, e.g., by at least about 5%, 10%, 20%, 30%, 40%, 50%, 60%, 70%, 80%, 90%, 100%, 200%, 300%, 400%, 500%, 600%, 700%, 800%, 900%, 1000%, 2000%, 3000%, 4000%, 5000%, 10,000%, 50,000%, or 100,000%, relative to that of a corresponding biological sample from a subject that has not received a fusosome composition (e.g., the same subject prior to administration of the fusosome composition). In some instances, the level of the activity detected is decreased, e.g., by at least about 5%, 10%, 20%, 30%, 40%, 50%, 60%, 70%, 80%, 90%, 100%, 200%, 300%, 400%, 500%, 600%, 700%, 800%, 900%, 1000%, 2000%, 3000%, 4000%, 5000%, 10,000%, 50,000%, or 100,000%, relative to that of a corresponding biological sample from a subject that has not received a fusosome composition. In some embodiments, the subject is the same subject prior to administration of the fusosome composition, and in some embodiments, the subject is a different subject.

[0751] In one aspect, the present disclosure provides a method of assessing fusosome fusion to a target cell in a subject, comprising providing a biological sample from a subject that has received a fusosome composition, e.g., as described herein, and assessing a level of unfused fusosomes in the biological sample.

[0752] In some embodiments of the methods of assessing fusosome content of a target cell (e.g., fusosome fusion to a target cell), resulting in formation of a recipient cell, in the subject, the method further comprises collecting the biological sample from the subject. In embodiments, the biological sample includes one or more recipient cells.

[0753] In some embodiments of the methods of assessing fusosome content of a target cell (e.g., fusosome fusion to a target cell) in the subject, the method further comprises separating recipient cells in the biological sample from unfused fusosomes in the biological sample, e.g., by centrifugation. In some embodiments, the method further comprises enriching recipient cells relative to unfused fusosomes in the biological sample, e.g., by centrifugation. In some embodiments, the method further comprises enriching target cells relative to non-target cells in the biological sample, e.g., by FACS.

[0754] In some embodiments of the methods of assessing fusosome content of a target cell (e.g., fusosome fusion to a target cell) in a subject, the activity relating to the fusosome composition is chosen from the presence or level of a metabolite, the presence or level of a biomarker (e.g., a protein level or post-translational modification, e.g., phosphorylation or cleavage).

[0755] In some embodiments of the methods of assessing fusosome content of a target cell (e.g., fusosome fusion to a target cell) in a subject, the activity relating to the fusosome composition is immunogenicity. In embodiments, the target cell is a CD3+ cell and the biological sample is a blood sample collected from the subject. In embodiments, blood cells are enriched from the blood sample, e.g., using a buffered ammonium chloride solution. In embodiments, enriched blood cells are incubated with an anti-CD3 antibody (e.g., a murine anti-CD3-FITC antibody) and CD3+ cells are selected, e.g., by fluorescence activated cell sorting. In embodiments, cells, e.g., sorted cells, e.g., CD3+ cells are analyzed for the presence of antibodies on the cell surface, e.g., by staining with an anti-IgM antibody. In some embodiments, if antibodies are present at a level above a reference level, the subject is identified as having an immune response against recipient cells.

[0756] In embodiments, immunogenicity is assayed by a cell lysis assay. In embodiments, recipient cells from the biological sample are co-incubated with immune effector cells capable of lysing other cells. In embodiments, the immune effector cells are from the subject or from a subject not administered the fusosome composition. For instance, in embodiments, immunogenicity is assessed by a PBMC cell lysis assay. In embodiments, recipient cells from the biological sample are co-incubated with peripheral blood mononuclear cells (PBMCs) from the subject or control PBMCs from a subject not administered the fusosome composition and then assessed for lysis of the recipient cells by PBMCs. In embodiments, immunogenicity is assessed by a natural killer (NK) cell lysis assay. In embodiments, recipient cells are co-incubated with NK cells from the subject or control NK cells from a subject not administered the fusosome composition and then assessed for lysis of the recipient cells by the NK cells. In embodiments, immunogenicity is assessed by a CD8+ T-cell lysis assay. In embodiments, recipient cells are co-incubated with CD8+ T-cells from the subject or control CD8+ T-cells from a subject not administered the fusosome composition and then assessed for lysis of the target cells by the CD8+ T-cells. In some embodiments, if cell lysis occurs at a level above a reference level, the subject is identified as having an immune response against recipient cells.

[0757] In some embodiments, immunogenicity is assayed by phagocytosis of recipient cells, e.g., by macrophages. In embodiments, recipient cells are not targeted by macrophages for phagocytosis. In embodiments, the biological sample is a blood sample collected from the subject. In embodiments, blood cells are enriched from the blood sample, e.g., using a buffered ammonium chloride solution. In embodiments, enriched blood cells are incubated with an anti-CD3 antibody (e.g., a murine anti-CD3-FITC antibody) and CD3+ cells are selected, e.g., by fluorescence activated cell sorting. In embodiments, fluorescently-labeled CD3+ cells are incubated with macrophages and then tested for intracellular fluorescence within the macrophages, e.g., by flow cytometry. In some embodiments, if macrophage phagocytosis occurs at a level above a reference level, the subject is identified as having an immune response against recipient cells.

### X. Pharmaceutical Compositions and Methods of Making them

[0758] The present disclosure also provides, in some aspects, a pharmaceutical composition comprising the fusosome composition described herein and pharmaceutically acceptable carrier. The pharmaceutical compositions can include any of the described fusosomes, e.g. retroviral vectors, or VLPs.

[0759] In some embodiments, one or more transducing units of retroviral vector are administered to the subject. In some embodiments, at least 1, 10, 100, 1000, 10⁴, 10⁵, 10⁶, 10⁷, 10⁸, 10⁹, 10¹⁰, 10¹¹, 10¹², 10¹³, or 10¹⁴, transducing units per kg are administered to the subject. In some embodiments at least 1, 10, 100, 1000, 10⁴, 10⁵, 10⁶, 10⁷, 10⁸, 10⁹, 10¹⁰, 10¹¹, 10¹², 10¹³, or 10¹⁴, transducing units per target cell per ml of blood are administered to the subject.

### Concentration and Purification of Lentivirus

[0760] In some embodiments, a retroviral vector formulation described herein can be produced by a process comprising one or more of, e.g., all of, the following steps (i) to (vi), e.g., in chronological order:
[0761] (i) culturing cells that produce retroviral vector;
[0762] (ii) harvesting the retroviral vector containing supernatant;
[0763] (iii) optionally clarifying the supernatant;
[0764] (iv) purifying the retroviral vector to give a retroviral vector preparation;
[0765] (v) optionally filter-sterilization of the retroviral vector preparation; and
[0766] (vi) concentrating the retroviral vector preparation to produce the final bulk product.

[0767] In some embodiments the process does not comprise the clarifying step (iii). In other embodiments the process does include the clarifying step (iii). In some embodiments, step (vi) is performed using ultrafiltration, or tangential flow filtration, more preferably hollow fiber ultrafiltration. In some embodiments, the purification method in step (iv) is ion exchange chromatography, more preferably anion exchange chromatography. In some embodiments, the filter-sterilisation in step (v) is performed using a 0.22 μm or a 0.2 μm sterilising filter. In some embodiments, step (iii) is performed by filter clarification. In some embodiments, step (iv) is performed using a method or a combination of methods selected from chromatography, ultrafiltration/diafiltration, or centrifugation. In some embodiments, the chromatography method or a combination of methods is selected from ion exchange chromatography, hydrophobic interaction chromatography, size exclusion chromatography, affinity chromatography, reversed phase chromatography, and immobilized metal ion affinity chromatography. In some embodiments, the centrifugation method is selected from zonal centrifugation, isopycnic centrifugation and pelleting centrifugation. In some embodiments, the ultrafiltration/diafiltration method is selected from tangential flow diafiltration, stirred cell diafiltration and dialysis. In some embodiments, at least one step is included into the process to degrade nucleic acid to improve purification. In some embodiments, said step is nuclease treatment.

[0768] In some embodiments, concentration of the vectors is done before filtration. In some embodiments, concentration of the vectors is done after filtration. In some embodiments, concentration and filtrations steps are repeated.

[0769] In some embodiments, the final concentration step is performed after the filter-sterilisation step. In some embodiments, the process is a large scale-process for producing clinical grade formulations that are suitable for administration to humans as therapeutics. In some embodiments, the filter-sterilisation step occurs prior to a concentration step. In some embodiments, the concentration step is the final step in the process and the filter-sterilisation step is the penultimate step in the process. In some embodiments, the concentration step is performed using ultrafiltration, preferably tangential flow filtration, more preferably hollow fiber ultrafiltration. In some embodiments, the filter-sterilisation step is performed using a sterilising filter with a maximum pore size of about 0.22 μm. In another preferred embodiment the maximum pore size is 0.2 μm

[0770] In some embodiments, the vector concentration is less than or equal to about 4.6×10¹¹ RNA genome copies per ml of preparation prior to filter-sterilisation. The appropriate concentration level can be achieved through controlling the vector concentration using, e.g. a dilution step, if appropriate. Thus, in some embodiments, a retroviral vector preparation is diluted prior to filter sterilisation.

[0771] Clarification may be done by a filtration step, removing cell debris and other impurities. Suitable filters may utilize cellulose filters, regenerated cellulose fibers, cellulose fibers combined with inorganic filter aids (e.g. diatomaceous earth, perlite, fumed silica), cellulose filters combined with inorganic filter aids and organic resins, or any combination thereof, and polymeric filters (examples include but are not limited to nylon, polypropylene, polyethersulfone) to achieve effective removal and acceptable recoveries. A multiple stage process may be used. An exemplary two or three-stage process would consist of a coarse filter(s) to remove large precipitate and cell debris followed by polishing second stage filter(s) with nominal pore sizes greater than 0.2 micron but less than 1 micron. The optimal combination may be a function of the precipitate size distribution as well as other variables. In addition, single stage operations employing a relatively small pore size filter or centrifugation may also be used for clarification. More generally, any clarification approach including but not limited to dead-end filtration, microfiltration, centrifugation, or body feed of filter aids (e.g. diatomaceous earth) in combination with dead-end or depth filtration, which provides a filtrate of suitable clarity to not foul the membrane and/or resins in the subsequent steps, will be acceptable to use in the clarification step of the present invention.

[0772] In some embodiments, depth filtration and membrane filtration is used. Commercially available products useful in this regard are for instance mentioned in WO 03/097797, p. 20-21. Membranes that can be used may be composed of different materials, may differ in pore size, and may be used in combinations. They can be commercially obtained from several vendors. In some embodiments, the filter used for clarification is in the range of 1.2 to 0.22 μm. In some embodiments, the filter used for clarification is either a 1.2/0.45 μm filter or an asymmetric filter with a minimum nominal pore size of 0.22 μm

[0773] In some embodiments, the method employs nuclease to degrade contaminating DNA/RNA, i.e. mostly host cell nucleic acids. Exemplary nucleases suitable for use in the present invention include Benzonase® Nuclease (EP 0229866) which attacks and degrades all forms of DNA and RNA (single stranded, double stranded linear or circular) or any other DNase and/or RNase commonly used within the art for the purpose of eliminating unwanted or contaminating DNA and/or RNA from a preparation. In preferred embodiments, the nuclease is Benzonase® Nuclease, which rapidly hydrolyzes nucleic acids by hydrolyzing internal phosphodiester bonds between specific nucleotides, thereby reducing the size of the polynucleotides in the vector containing supernatant. Benzonase® Nuclease can be commercially obtained from Merck KGaA (code W214950). The concentration in which the nuclease is employed is preferably within the range of 1-100 units/ml.

[0774] In some embodiments, the vector suspension is subjected to ultrafiltration (sometimes referred to as diafiltration when used for buffer exchange) at least once during the process, e.g. for concentrating the vector and/or buffer exchange. The process used to concentrate the vector can include any filtration process (e.g., ultrafiltration (UF)) where the concentration of vector is increased by forcing diluent to be passed through a filter in such a manner that the diluent is removed from the vector preparation whereas the vector is unable to pass through the filter and thereby remains, in concentrated form, in the vector preparation. UF is described in detail in, e.g., Microfiltration and Ultrafiltration: Principles and Applications, L. Zeman and A. Zydney (Marcel Dekker, Inc., New York, N.Y., 1996); and in: Ultrafiltration Handbook, Munir Cheryan (Technomic Publishing, 1986; ISBN No. 87762-456-9). A suitable filtration process is Tangential Flow Filtration (“TFF”) as described in, e.g., MILLIPORE catalogue entitled “Pharmaceutical Process Filtration Catalogue” pp. 177-202 (Bedford, Mass., 1995/96). TFF is widely used in the bioprocessing industry for cell harvesting, clarification, purification and concentration of products including viruses. The system is composed of three distinct process streams: the feed solution, the permeate and the retentate. Depending on application, filters with different pore sizes may be used. In some embodiments, the retentate contains the product (lentiviral vector). The particular ultrafiltration membrane selected may have a pore size sufficiently small to retain vector but large enough to effectively clear impurities. Depending on the manufacturer and membrane type, for retroviral vectors nominal molecular weight cutoffs (NMWC) between 100 and 1000 kDa may be appropriate, for instance membranes with 300 kDa or 500 kDa NMWC. The membrane composition may be, but is not limited to, regenerated cellulose, polyethersulfone, polysulfone, or derivatives thereof. The membranes can be flat sheets (also called flat screens) or hollow fibers. A suitable UF is hollow fibre UF, e.g., filtration using filters with a pore size of smaller than 0.1 μm. Products are generally retained, while volume can be reduced through permeation (or be kept constant during diafiltration by adding buffer with the same speed as the speed with which the permeate, containing buffer and impurities, is removed at the permeate side).

[0775] The two most widely used geometries for TFF in the biopharmaceutical industry are plate & frame (flat screens) and hollow fiber modules. Hollow fiber units for ultrafiltration and microfiltration were developed by Amicon and Ramicon in the early 1970s (Cheryan, M. Ultrafiltration Handbook), even though now there are multiple vendors including Spectrum and GE Healthcare. The hollow fiber modules consist of an array of self-supporting fibers with a dense skin layer. Fiber diameters range from 0.5 mm-3 mm. In certain embodiments, hollow fibers are used for TFF. In certain embodiments, hollow fibers of 500 kDa (0.05 μm) pore size are used. Ultrafiltration may comprise diafiltration (DF). Microsolutes can be removed by adding solvent to the solution being ultrafiltered at a rate equal to the UF rate. This washes microspecies from the solution at a constant volume, purifying the retained vector.

[0776] UF/DF can be used to concentrate and/or buffer exchange the vector suspensions in different stages of the purification process. The method can utilize a DF step to exchange the buffer of the supernatant after chromatography or other purification steps, but may also be used prior to chromatography.

[0777] In some embodiments, the eluate from the chromatography step is concentrated and further purified by ultrafiltration-diafiltration. During this process the vector is exchanged into formulation buffer. Concentration to the final desired concentration can take place after the filter-sterilisation step. After said sterile filtration, the filter sterilised substance is concentrated by aseptic UF to produce the bulk vector product.

[0778] In embodiments, the ultrafiltration/diafiltration may be tangential flow diafiltration, stirred cell diafiltration and dialysis.

[0779] Purification techniques tend to involve the separation of the vector particles from the cellular milieu and, if necessary, the further purification of the vector particles. One or more of a variety of chromatographic methods may be used for this purification. Ion exchange, and more particularly anion exchange, chromatography is a suitable method, and other methods could be used. A description of some chromatographic techniques is given below.

[0780] Ion-exchange chromatography utilises the fact that charged species, such as biomolecules and viral vectors, can bind reversibly to a stationary phase (such as a membrane, or else the packing in a column) that has, fixed on its surface, groups that have an opposite charge. There are two types of ion exchangers. Anion exchangers are stationary phases that bear groups having a positive charge and hence can bind species with a negative charge. Cation exchangers bear groups with a negative charge and hence can bind species with positive charge. The pH of the medium has an influence on this, as it can alter the charge on a species. Thus, for a species such as a protein, if the pH is above the pI, the net charge will be negative, whereas below the pI, the net charge will be positive.

[0781] Displacement (elution) of the bound species can be effected by the use of suitable buffers. Thus commonly the ionic concentration of the buffer is increased until the species is displaced through competition of buffer ions for the ionic sites on the stationary phase. An alternative method of elution entails changing the pH of the buffer until the net charge of the species no longer favours biding to the stationary phase. An example would be reducing the pH until the species assumes a net positive charge and will no longer bind to an anion exchanger.

[0782] Some purification can be achieved if impurities are uncharged, or else if they bear a charge of opposite sign to that of the desired species, but the same sign to that on the ion exchanger. This is because uncharged species and those having a charge of the same sign to that an ion exchanger, will not normally bind. For different bound species, the strength of the binding varies with factors such as the charge density and the distribution of charges on the various species. Thus by applying an ionic or pH gradient (as a continuous gradient, or as a series of steps), the desired species might be eluted separately from impurities.

[0783] Size exclusion chromatography is a technique that separates species according to their size. Typically it is performed by the use of a column packed with particles having pores of a well-defined size. For the chromatographic separation, particles are chosen that have pore sizes that are appropriate with regard to the sizes of the species in the mixture to be separated. When the mixture is applied, as a solution (or suspension, in the case of a virus), to the column and then eluted with buffer, the largest particles will elute first as they have limited (or no) access to the pores. Smaller particles will elute later as they can enter the pores and hence take a longer path through the column. Thus in considering the use of size exclusion chromatography for the purification of viral vectors, it would be expected that the vector would be eluted before smaller impurities such as proteins.

[0784] Species, such as proteins, have on their surfaces, hydrophobic regions that can bind reversibly to weakly hydrophobic sites on a stationary phase. In media having a relatively high salt concentration, this binding is promoted. Typically in HIC the sample to be purified is bound to the stationary phase in a high salt environment. Elution is then achieved by the application of a gradient (continuous, or as a series of steps) of decreasing salt concentration. A salt that is commonly used is ammonium sulphate. Species having differing levels of hydrophobicity will tend to be eluted at different salt concentrations and so the target species can be purified from impurities. Other factors, such as pH, temperature and additives to the elution medium such as detergents, chaotropic salts and organics can also influence the strength of binding of species to HIC stationary phases. One, or more, of these factors can be adjusted or utilised to optimise the elution and purification of product.

[0785] Viral vectors have on their surface, hydrophobic moieties such as proteins, and thus HIC could potentially be employed as a means of purification.

[0786] Like HIC, RPC separates species according to differences in their hydrophobicities. A stationary phase of higher hydrophobicity than that employed in HIC is used. The stationary phase often consists of a material, typically silica, to which are bound hydrophobic moieties such as alkyl groups or phenyl groups. Alternatively the stationary phase might be an organic polymer, with no attached groups. The sample-containing the mixture of species to be resolved is applied to the stationary phase in an aqueous medium of relatively high polarity which promotes binding. Elution is then achieved by reducing the polarity of the aqueous medium by the addition of an organic solvent such as isopropanol or acetonitrile. Commonly a gradient (continuous, or as a series of steps) of increasing organic solvent concentration is used and the species are eluted in order of their respective hydrophobicities.

[0787] Other factors, such as the pH of the elution medium, and the use of additives, can also influence the strength of binding of species to RPC stationary phases. One, or more, of these factors can be adjusted or utilised to optimise the elution and purification of product. A common additive is trifluororacetic acid (TFA). This suppresses the ionisation of acidic groups such as carboxyl moieties in the sample. It also reduces the pH in the eluting medium and this suppresses the ionisation of free silanol groups that may be present on the surface of stationary phases having a silica matrix. TFA is one of a class of additives known as ion pairing agents. These interact with ionic groups, present on species in the sample, that bear an opposite charge. The interaction tends to mask the charge, increasing the hydrophobicity of the species. Anionic ion pairing agents, such as TFA and pentafluoropropionic acid interact with positively charged groups on a species. Cationic ion pairing agents such, as triethylamine, interact with negatively charged groups.

[0788] Viral vectors have on their surface, hydrophobic moieties such as proteins, and thus RPC, potentially, could be employed as a means of purification.

[0789] Affinity chromatography utilises the fact that certain ligands that bind specifically with biomolecules such as proteins or nucleotides, can be immobilised on a stationary phase. The modified stationary phase can then be used to separate the relevant biomolecule from a mixture. Examples of highly specific ligands are antibodies, for the purification of target antigens and enzyme inhibitors for the purification of enzymes. More general interactions can also be utilised such as the use of the protein A ligand for the isolation of a wide range of antibodies.

[0790] Typically, affinity chromatography is performed by application of a mixture, containing the species of interest, to the stationary phase that has the relevant ligand attached. Under appropriate conditions this will lead to the binding of the species to the stationary phase. Unbound components are then washed away before an eluting medium is applied. The eluting medium is chosen to disrupt the binding of the ligand to the target species. This is commonly achieved by choice of an appropriate ionic strength, pH or by the use of substances that will compete with the target species for ligand sites. For some bound species, a chaotropic agent such as urea is used to effect displacement from the ligand. This, however, can result in irreversible denaturation of the species.

[0791] Viral vectors have on their surface, moieties such as proteins, that might be capable of binding specifically to appropriate ligands. This means that, potentially, affinity chromatography could be used in their isolation.

[0792] Biomolecules, such as proteins, can have on their surface, electron donating moieties that can form coordinate bonds with metal ions. This can facilitate their binding to stationary phases carrying immobilised metal ions such as Ni²⁺, Cu²⁺, Zn²⁺ or Fe³⁺. The stationary phases used in IMAC have chelating agents, typically nitriloacetic acid or iminodiacetic acid covalently attached to their surface and it is the chelating agent that holds the metal ion. It is necessary for the chelated metal ion to have at least one coordination site left available to form a coordinate bond to a biomolecule. Potentially there are several moieties on the surface of biomolecules that might be capable of bonding to the immobilised metal ion. These include histidine, tryptophan and cysteine residues as well as phosphate groups. For proteins, however, the predominant donor appears to be the imidazole group of the histidine residue. Native proteins can be separated using IMAC if they exhibit suitable donor moieties on their surface. Otherwise IMAC can be used for the separation of recombinant proteins bearing a chain of several linked histidine residues.

[0793] Typically, IMAC is performed by application of a mixture, containing the species of interest, to the stationary phase. Under appropriate conditions this will lead to the coordinate bonding of the species to the stationary phase. Unbound components are then washed away before an eluting medium is applied. For elution, gradients (continuous, or as a series of steps) of increasing salt concentration or decreasing pH may be used. Also a commonly used procedure is the application of a gradient of increasing imidazole concentration. Biomolecules having different donor properties, for example having histidine residues in differing environments, can be separated by the use of gradient elution.

[0794] Viral vectors have on their surface, moieties such as proteins, that might be capable of binding to IMAC stationary phases. This means that, potentially, IMAC could be used in their isolation.

[0795] Suitable centrifugation techniques include zonal centrifugation, isopycnic ultra and pelleting centrifugation.

[0796] Filter-sterilisation is suitable for processes for pharmaceutical grade materials. Filter-sterilisation renders the resulting formulation substantially free of contaminants. The level of contaminants following filter-sterilisation is such that the formulation is suitable for clinical use. Further concentration (e.g. by ultrafiltration) following the filter-sterilisation step may be performed in aseptic conditions. In some embodiments, the sterilising filter has a maximum pore size of 0.22 μm.

[0797] The retroviral vectors herein can also be subjected to methods to concentrate and purify a lentiviral vector using flow-through ultracentrifugation and high-speed centrifugation, and tangential flow filtration. Flow through ultracentrifugation can be used for the purification of RNA tumor viruses (Toplin et al, Applied Microbiology 15:582-589, 1967; Burger et al., Journal of the National Cancer Institute 45: 499-503, 1970). Flow-through ultracentrifugation can be used for the purification of Lentiviral vectors. This method can comprise one or more of the following steps. For example, a lentiviral vector can be produced from cells using a cell factory or bioreactor system. A transient transfection system can be used or packaging or producer cell lines can also similarly be used. A pre-clarification step prior to loading the material into the ultracentrifuge could be used if desired. Flow-through ultracentrifugation can be performed using continuous flow or batch sedimentation. The materials used for sedimentation are, e.g.: Cesium chloride, potassium tartrate and potassium bromide, which create high densities with low viscosity although they are all corrosive. CsCl is frequently used for process development as a high degree of purity can be achieved due to the wide density gradient that can be created (1.0 to 1.9 g/cm³). Potassium bromide can be used at high densities, e.g., at elevated temperatures, such as 25° C., which may be incompatible with stability of some proteins. Sucrose is widely used due to being inexpensive, non-toxic and can form a gradient suitable for separation of most proteins, sub-cellular fractions and whole cells. Typically the maximum density is about 1.3 g/cm³. The osmotic potential of sucrose can be toxic to cells in which case a complex gradient material can be used, e.g. Nycodenz. A gradient can be used with 1 or more steps in the gradient. An embodiment is to use a step sucrose gradient. The volume of material can be from 0.5 liters to over 200 liters per run. The flow rate speed can be from 5 to over 25 liters per hour. A suitable operating speed is between 25,000 and 40,500 rpm producing a force of up to 122,000×g. The rotor can be unloaded statically in desired volume fractions. An embodiment is to unload the centrifuged material in 100 ml fractions. The isolated fraction containing the purified and concentrated Lentiviral vector can then be exchanged in a desired buffer using gel filtration or size exclusion chromatography. Anionic or cationic exchange chromatography could also be used as an alternate or additional method for buffer exchange or further purification. In addition, Tangential Flow Filtration can also be used for buffer exchange and final formulation if required. Tangential Flow Filtration (TFF) can also be used as an alternative step to ultra or high speed centrifugation, where a two step TFF procedure would be implemented. The first step would reduce the volume of the vector supernatant, while the second step would be used for buffer exchange, final formulation and some further concentration of the material. The TFF membrane can have a membrane size of between 100 and 500 kilodaltons, where the first TFF step can have a membrane size of 500 kilodaltons, while the second TFF can have a membrane size of between 300 to 500 kilodaltons. The final buffer should contain materials that allow the vector to be stored for long term storage.

[0798] In embodiments, the method uses either cell factories that contains adherent cells, or a bioreactor that contains suspension cells that are either transfected or transduced with the vector and helper constructs to produce lentiviral vector. Non limiting examples or bioreactors, include the Wave bioreactor system and the Xcellerex bioreactors. Both are disposable systems. However non-disposable systems can also be used. The constructs can be those described herein, as well as other lentiviral transduction vectors. Alternatively the cell line can be engineered to produce Lentiviral vector without the need for transduction or transfection. After transfection, the lentiviral vector can be harvested and filtered to remove particulates and then is centrifuged using continuous flow high speed or ultra centrifugation. A preferred embodiment is to use a high speed continuous flow device like the JCF-A zonal and continuous flow rotor with a high speed centrifuge. Also preferably is the use of Contifuge Stratus centrifuge for medium scale Lentiviral vector production. Also suitable is any continuous flow centrifuge where the speed of centrifugation is greater than 5,000×g RCF and less than 26,000×g RCF. Preferably, the continuous flow centrifugal force is about 10,500×g to 23,500×g RCF with a spin time of between 20 hours and 4 hours, with longer centrifugal times being used with slower centrifugal force. The lentiviral vector can be centrifuged on a cushion of more dense material (a non limiting example is sucrose but other reagents can be used to form the cushion and these are well known in the art) so that the Lentiviral vector does not form aggregates that are not filterable, as sometimes occurs with straight centrifugation of the vector that results in a viral vector pellet. Continuous flow centrifugation onto a cushion allows the vector to avoid large aggregate formation, yet allows the vector to be concentrated to high levels from large volumes of transfected material that produces the Lentiviral vector. In addition, a second less-dense layer of sucrose can be used to band the Lentiviral vector preparation. The flow rate for the continuous flow centrifuge can be between 1 and 100 ml per minute, but higher and lower flow rates can also be used. The flow rate is adjusted to provide ample time for the vector to enter the core of the centrifuge without significant amounts of vector being lost due to the high flow rate. If a higher flow rate is desired, then the material flowing out of the continuous flow centrifuge can be re-circulated and passed through the centrifuge a second time. After the virus is concentrated using continuous flow centrifugation, the vector can be further concentrated using Tangential Flow Filtration (TFF), or the TFF system can be simply used for buffer exchange. A non-limiting example of a TFF system is the Xampler cartridge system that is produced by GB-Healthcare. Preferred cartridges are those with a MW cut-off of 500,000 MW or less. Preferably a cartridge is used with a MW cut-off of 300,000 MW. A cartridge of 100,000 MW cut-off can also be used. For larger volumes, larger cartridges can be used and it will be easy for those in the art to find the right TFF system for this final buffer exchange and/or concentration step prior to final fill of the vector preparation. The final fill preparation may contain factors that stabilize the vector—sugars are generally used and are known in the art.

[0799] Protein Content

[0800] In some embodiments the retroviral particle includes various source cell genome-derived proteins, exogenous proteins, and viral-genome derived proteins. In some embodiments the retroviral particle contains various ratios of source cell genome-derived proteins to viral-genome-derived proteins, source cell genome-derived proteins to exogenous proteins, and exogenous proteins to viral-genome derived proteins.

[0801] In some embodiments, the viral-genome derived proteins are GAG polyprotein precursor, HIV-1 Integrase, POL polyprotein precursor, Capsid, Nucleocapsid, p17 matrix, p6, p2, VPR, Vif.

[0802] In some embodiments, the source cell-derived proteins are Cyclophilin A, Heat Shock 70 kD, Human Elongation Factor-1 Alpha (EF-1R), Histones H1, H2A, H3, H4, beta-globin, Trypsin Precursor, Parvulin, Glyceraldehyde-3-phosphate dehydrogenase, Lck, Ubiquitin, SUMO-1, CD48, Syntenin-1, Nucleophosmin, Heterogeneous nuclear ribonucleoproteins C1/C2, Nucleolin, Probable ATP-dependent helicase DDX48, Matrin-3, Transitional ER ATPase, GTP-binding nuclear protein Ran, Heterogeneous nuclear ribonucleoprotein U, Interleukin enhancer binding factor 2, Non-POU domain containing octamer binding protein, RuvB like 2, HSP 90-b, HSP 90-a, Elongation factor 2, D-3-phosphoglycerate dehydrogenase, a-enolase, C-1-tetrahydrofolate synthase, cytoplasmic, Pyruvate kinase, isozymes M1/M2, Ubiquitin activating enzyme E1, 26S protease regulatory subunit S10B, 60S acidic ribosomal protein P2, 60S acidic ribosomal protein P0, 40S ribosomal protein SA, 40S ribosomal protein S2, 40S ribosomal protein S3, 60S ribosomal protein L4, 60S ribosomal protein L3, 40S ribosomal protein S3a, 40S ribosomal protein S7, 60S ribosomal protein L7a, 60S acidic ribosomal protein L31, 60S ribosomal protein L10a, 60S ribosomal protein L6, 26S proteasome non-ATPase regulatory subunit 1, Tubulin b-2 chain, Actin, cytoplasmic 1, Actin, aortic smooth muscle, Tubulin a-ubiquitous chain, Clathrin heavy chain 1, Histone H2B.b, Histone H4, Histone H3.1, Histone H3.3, Histone H2A type 8, 26S protease regulatory subunit 6A, Ubiquitin-4, RuvB like 1, 26S protease regulatory subunit 7, Leucyl-tRNA synthetase, cytoplasmic, 60S ribosomal protein L19, 26S proteasome non-ATPase regulatory subunit 13, Histone H2B.F, U5 small nuclear ribonucleoprotein 200 kDa helicase, Poly[ADP-ribose]polymerase-1, ATP-dependent DNA helicase II, DNA replication licensing factor MCM5, Nuclease sensitive element binding protein 1, ATP-dependent RNA helicase A, Interleukin enhancer binding factor 3, Transcription elongation factor B polypeptide 1, Pre-mRNA processing splicing factor 8, Staphylococcal nuclease domain containing protein 1, Programmed cell death 6-interacting protein, Mediator of RNA polymerase II transcription subunit 8 homolog, Nucleolar RNA helicase II, Endoplasmin, DnaJ homolog subfamily A member 1, Heat shock 70 kDa protein 1L, T-complex protein 1 e subunit, GCN1-like protein 1, Serotransferrin, Fructose bisphosphate aldolase A, Inosine-5′monophosphate dehydrogenase 2, 26S protease regulatory subunit 6B, Fatty acid synthase, DNA-dependent protein kinase catalytic subunit, 40S ribosomal protein S17, 60S ribosomal protein L7, 60S ribosomal protein L12, 60S ribosomal protein L9, 40S ribosomal protein S8, 40S ribosomal protein S4 X isoform, 60S ribosomal protein L11, 26S proteasome non-ATPase regulatory subunit 2, Coatomer a subunit, Histone H2A.z, Histone H1.2, Dynein heavy chain cytosolic. See: Saphire et al., Journal of Proteome Research, 2005, and Wheeler et al., Proteomics Clinical Applications, 2007.

[0803] In some embodiments the retroviral vector is pegylated.

### Particle Size

[0804] In some embodiments the median retroviral vector diameter is between 10 and 1000 nM, 25 and 500 nm 40 and 300 nm, 50 and 250 nm, 60 and 225 nm, 70 and 200 nm, 80 and 175 nm, or 90 and 150 nm.

[0805] In some embodiments, 90% of the retroviral vectors fall within 50% of the median diameter of the retrovirus. In some embodiments, 90% of the retroviral vectors fall within 25% of the median diameter of the retrovirus. In some embodiments, 90% of the retroviral vectors fall within 20% of the median diameter of the retrovirus. In some embodiments, 90% of the retroviral vectors fall within 15% of the median diameter of the retrovirus. In some embodiments, 90% of the retroviral vectors fall within 10% of the median diameter of the retrovirus.

### XI. Indications and Uses

[0806] The fusosomes, retroviral vectors, VLPs, or pharmaceutical compositions described herein can be administered to a subject, e.g., a mammal, e.g., a human. In such embodiments, the subject may be at risk of, may have a symptom of, or may be diagnosed with or identified as having, a particular disease or condition (e.g., a disease or condition described herein). In some embodiments, the disease is a genetic deficiency, e.g., a genetic deficiency listed in Table 5 or Table 6.

[0807] This disclosure also provides, in certain aspects, a method of administering a fusosome composition to a subject (e.g., a human subject), a target tissue, or a cell, comprising administering to the subject, or contacting the target tissue or the cell with a fusosome composition comprising a plurality of fusosomes described herein, a fusosome composition described herein, or a pharmaceutical composition described herein, thereby administering the fusosome composition to the subject.

[0808] This disclosure also provides, in certain aspects, a method of delivering a therapeutic agent (e.g., a polypeptide, a nucleic acid, a metabolite, an organelle, or a subcellular structure) to a subject, a target tissue, or a cell, comprising administering to the subject, or contacting the target tissue or the cell with, a plurality of fusosomes described herein, a fusosome composition comprising a plurality of fusosomes described herein, a fusosome composition described herein, or a pharmaceutical composition described herein, wherein the fusosome composition is administered in an amount and/or time such that the therapeutic agent is delivered.

[0809] This disclosure also provides, in certain aspects, a method of delivering a function to a subject, a target tissue, or a cell, comprising administering to the subject, or contacting the target tissue or the cell with, a plurality of fusosomes described herein, a fusosome composition comprising a plurality of fusosomes described herein, a fusosome composition described herein, or a pharmaceutical composition described herein, wherein the fusosome composition is administered in an amount and/or time such that the function is delivered.

[0810] Target cells from mammalian (e.g., human) tissue include cells from epithelial, connective, muscular, or nervous tissue or cells, and combinations thereof. Target mammalian (e.g., human) cells and organ systems include the cardiovascular system (heart, vasculature); digestive system (esophagus, stomach, liver, gallbladder, pancreas, intestines, colon, rectum and anus); endocrine system (hypothalamus, pituitary gland, pineal body or pineal gland, thyroid, parathyroids, adrenal glands); excretory system (kidneys, ureters, bladder); lymphatic system (lymph, lymph nodes, lymph vessels, tonsils, adenoids, thymus, spleen); integumentary system (skin, hair, nails); muscular system (e.g., skeletal muscle); nervous system (brain, spinal cord, nerves)′; reproductive system (ovaries, uterus, mammary glands, testes, vas deferens, seminal vesicles, prostate); respiratory system (pharynx, larynx, trachea, bronchi, lungs, diaphragm); skeletal system (bone, cartilage), and combinations thereof. In some embodiments, a non-target cells or organ system is chosen from the cardiovascular system (heart, vasculature); digestive system (esophagus, stomach, liver, gallbladder, pancreas, intestines, colon, rectum and anus); endocrine system (hypothalamus, pituitary gland, pineal body or pineal gland, thyroid, parathyroids, adrenal glands); excretory system (kidneys, ureters, bladder); lymphatic system (lymph, lymph nodes, lymph vessels, tonsils, adenoids, thymus, spleen); integumentary system (skin, hair, nails); muscular system (e.g., skeletal muscle); nervous system (brain, spinal cord, nerves)′; reproductive system (ovaries, uterus, mammary glands, testes, vas deferens, seminal vesicles, prostate); respiratory system (pharynx, larynx, trachea, bronchi, lungs, diaphragm); skeletal system (bone, cartilage), and combinations thereof.

[0811] The administration of a pharmaceutical composition described herein may be by way of oral, inhaled, transdermal or parenteral (including intravenous, intratumoral, intraperitoneal, intramuscular, intracavity, and subcutaneous) administration. The fusosomes may be administered alone or formulated as a pharmaceutical composition.

[0812] In embodiments, the fusosome composition mediates an effect on a target cell, and the effect lasts for at least 1, 2, 3, 4, 5, 6, or 7 days, 2, 3, or 4 weeks, or 1, 2, 3, 6, or 12 months. In some embodiments (e.g., wherein the fusosome composition comprises an exogenous protein), the effect lasts for less than 1, 2, 3, 4, 5, 6, or 7 days, 2, 3, or 4 weeks, or 1, 2, 3, 6, or 12 months.

[0813] In embodiments, the fusosome composition described herein is delivered ex-vivo to a cell or tissue, e.g., a human cell or tissue.

[0814] The fusosome compositions described herein can be administered to a subject, e.g., a mammal, e.g., a human. In such embodiments, the subject may be at risk of, may have a symptom of, or may be diagnosed with or identified as having, a particular disease or condition (e.g., a disease or condition described herein).

[0815] In some embodiments, the source of fusosomes are from the same subject that is administered a fusosome composition. In other embodiments, they are different. For example, the source of fusosomes and recipient tissue may be autologous (from the same subject) or heterologous (from different subjects). In either case, the donor tissue for fusosome compositions described herein may be a different tissue type than the recipient tissue. For example, the donor tissue may be muscular tissue and the recipient tissue may be connective tissue (e.g., adipose tissue). In other embodiments, the donor tissue and recipient tissue may be of the same or different type, but from different organ systems.

[0816] In some embodiments, the fusosome is co-administered with an inhibitor of a protein that inhibits membrane fusion. For example, Suppressyn is a human protein that inhibits cell-cell fusion (Sugimoto et al., “A novel human endogenous retroviral protein inhibits cell-cell fusion” Scientific Reports 3:1462 DOI: 10.1038/srep01462). Thus, in some embodiments, the fusosome is co-administered with an inhibitor of sypressyn, e.g., a siRNA or inhibitory antibody.

[0817] Compositions described herein may also be used to similarly modulate the cell or tissue function or physiology of a variety of other organisms including but not limited to: farm or working animals (horses, cows, pigs, chickens etc.), pet or zoo animals (cats, dogs, lizards, birds, lions, tigers and bears etc.), aquaculture animals (fish, crabs, shrimp, oysters etc.), plants species (trees, crops, ornamentals flowers etc), fermentation species (saccharomyces etc.). Fusosome compositions described herein can be made from such non-human sources and administered to a non-human target cell or tissue or subject.

[0818] Fusosome compositions can be autologous, allogeneic or xenogeneic to the target.

### XII. Additional Therapeutic Agents

[0819] In some embodiments, the fusosome composition is co-administered with an additional agent, e.g., a therapeutic agent, to a subject, e.g., a recipient, e.g., a recipient described herein. In some embodiments, the co-administered therapeutic agent is an immunosuppressive agent, e.g., a glucocorticoid (e.g., dexamethasone), cytostatic (e.g., methotrexate), antibody (e.g., Muromonab-CD3), or immunophilin modulator (e.g., Ciclosporin or rapamycin). In embodiments, the immunosuppressive agent decreases immune mediated clearance of fusosomes. In some embodiments the fusosome composition is co-administered with an immunostimulatory agent, e.g., an adjuvant, an interleukin, a cytokine, or a chemokine.

[0820] In some embodiments, the fusosome composition and the immunosuppressive agent are administered at the same time, e.g., contemporaneously administered. In some embodiments, the fusosome composition is administered before administration of the immunosuppressive agent. In some embodiments, the fusosome composition is administered after administration of the immunosuppressive agent.

[0821] In some embodiments, the immunosuppressive agent is a small molecule such as ibuprofen, acetaminophen, cyclosporine, tacrolimus, rapamycin, mycophenolate, cyclophosphamide, glucocorticoids, sirolimus, azathriopine, or methotrexate.

[0822] In some embodiments, the immunosuppressive agent is an antibody molecule, including but not limited to: muronomab (anti-CD3), Daclizumab (anti-IL12), Basiliximab, Infliximab (Anti-TNFa), or rituximab (Anti-CD20).

[0823] In some embodiments, co-administration of the fusosome composition with the immunosuppressive agent results in enhanced persistence of the fusosome composition in the subject compared to administration of the fusosome composition alone. In some embodiments, the enhanced persistence of the fusosome composition in the co-administration is at least 10%, 20%, 30%, 40%, 50%, 60%, 70%, 80%, 90% or longer, compared to persistence of the fusosome composition when administered alone. In some embodiments, the enhanced persistence of the fusosome composition in the co-administration is at least 1, 2, 3, 4, 5, 6, 7, 10, 15, 20, 25, or 30 days or longer, compared to survival of the fusosome composition when administered alone.

### EXAMPLES

[0824] The Examples below are set forth to aid in the understanding of the inventions, but are not intended to, and should not be construed to, limit its scope in any way.

### Example 1. Assaying Off-Target Cells to Detect Specificity of Retroviral Nucleic Acid Delivery

[0825] This Example describes quantification of a nucleic acid in off-target recipient cells by measuring vector copy number in single cells.

[0826] In an embodiment, treated mice have a similar vector copy number in off-target cells as those from untreated mice, e.g., no vector or a vector number similar to negative control levels. In an embodiment, treated mice have a similar percent of off-target cells that contain the vector as those from untreated mice, e.g., no cells or a cell number similar to negative control levels.

[0827] In this example, the off-target recipient cell is a CD11c+ cell. However, this protocol may be adapted to any cell type for which suitable surface markers exist and which can be isolated from the subject. Notably, the methods described herein may be equally applicable to humans, rats, monkeys with optimization to the protocol.

[0828] Mice are treated with retroviral vector produced as described herein or with PBS (negative control). 28 days following treatment, peripheral blood is collected from mice that received retroviral vector and mice that received PBS treatment. Blood is collected into 1 ml PBS containing 5 μM EDTA and mixed immediately to prevent clotting. The tubes are kept on ice and red blood cells are removed using a buffered ammonium chloride (ACK) solution. Cells are stained with a murine CD11c:APC-Cy7 antibody (Biolegend Catalog #: 117323) or an isotype control APC-Cy7 antibody (Biolegend Catalog #: 400230) at 4° C. for 30 minutes in the dark, after being Fc blocked (Biolegend Catalog #: 101319) in cell staining buffer (Biolegend Catalog #: 420201) for 10 minutes. After being washed two times with PBS, cells are analyzed on a FACS Aria (BD Biosciences, San Jose, Calif.) with 640 nm laser excitation and emission collected at 780−/+ 60 nm running the FACSDiva™ software (BD Biosciences, San Jose, Calif.) to set negative gates using the isotype control APC-Cy7 antibody labeled cells. APC-Cy7 positive cells are sorted into single wells of plate for vector copy number analysis.

[0829] Vector copy number is assessed using single-cell nested PCR. PCR is performed with qPCR using primers and probes specific to the vector and an endogenous control gene. Vector copy number is determined by dividing the amount of vector qPCR signal by the amount of the endogenous control gene qPCR signal. A cell that received the vector will have a vector copy number of at least 1.0. Vector copy number is assessed across the population by averaging the vector copy number of the plurality of cells

[0830] In some embodiments, mice treated with retroviral vectors have a similar average vector copy number in off-target cells as those from mice treated with vehicle. In some embodiments, mice treated with treated with retroviral vectors have a similar percent of off-target cells that received the vector as those from mice treated with vehicle.

### Example 2. Assaying Off-Target Cells to Detect Specificity of Delivery of an Exogenous Protein Agent

[0831] This Example describes quantification of the expression of an exogenous agent in off-target recipient cells by exogenous agent expression in single cells.

[0832] In an embodiment, treated mice have similar exogenous agent expression in off-target cells as those from untreated mice. In an embodiment, treated mice have a similar percent of off-target cells that express the exogenous agent as those from untreated mice.

[0833] In this example, the off-target recipient cell is a CD11c+ cell. However, this protocol may be adapted to any cell type for which suitable surface markers exist and which can be isolated from the subject. Notably, the methods described herein may be equally applicable to humans, rats, monkeys with optimization to the protocol. In this example the exogenous agent is a fluorescent protein and expression is measured via flow cytometry. In other embodiments, the expression of an exogenous protein agent may be measured with immunostaining for the protein. In other embodiments expression of the exogenous protein agent may be measured via microscopy or western blot.

[0834] Mice are treated with retroviral vector with a tdtomato fluorescent protein agent produced via any of the methods described in this application or with PBS (negative control). 28 days following treatment, peripheral blood is collected from mice that received retroviral vector and mice that received PBS treatment. Blood is collected into 1 ml PBS containing 5 μM EDTA and mixed immediately to prevent clotting. The tubes are kept on ice and red blood cells are removed using a buffered ammonium chloride (ACK) solution. Cells are stained with a murine CD11c:APC-Cy7 antibody (Biolgend Catalog #: 117323) or isotype controls APC-Cy7 antibody (Biolegend Catalog #: 400230) at 4° C. for 30 minutes in the dark, after being Fc blocked (Biolegend Catalog #: 101319) in cell staining buffer (Biolegend Catalog #: 420201) for 10 minutes. After being washed two times with PBS, cells are analyzed on a FACS Aria (BD Biosciences, San Jose, Calif.) running the FACSDiva™ software (BD Biosciences, San Jose, Calif.). A negative gate for CD11c is set using the isotype control APC-Cy7 antibody labeled cells and with a 640 nm laser excitation and emission collected at 780−/+60. A negative gate for tdtomato expression is set with cells isolated from mice treated with vehicle and with a 552 nm laser excitation and an emission collected at 585−/+42 nm.

[0835] The percent of CD11c+ cells that are tdtomato positive is measured. In some embodiments, the percent of CD11c+ cells that are tdtomato positive is similar in cells from treated and untreated mice. The median tdtomato fluorescence level is measured in CD11c+ cells. In some embodiments, the median tdtomato fluorescence level in CD11c+ cells is similar in cells from treated and untreated mice.

### Example 3. Assaying Target Cells to Detect Specificity of Retroviral Nucleic Acid Delivery

[0836] This Example describes quantification of a nucleic acid in target recipient cells by measuring vector copy number in single cells.

[0837] In an embodiment, treated mice have a greater vector copy number in target cells than those from untreated mice. In an embodiment, treated mice have a greater percent of target cells that contain the vector than those from untreated mice.

[0838] In this example, the target recipient cell is a CD3+ cell. However, this protocol may be adapted to any cell type for which suitable surface markers exist and which can be isolated from the subject. Notably, the methods described herein may be equally applicable to humans, rats, monkeys with optimization to the protocol.

[0839] Mice are treated with retroviral vector and a blood sample is collected as described above in Example 1. Cells are stained with a murine CD3:APC-Cy7 antibody (Biolegend Catalog #: 100330) or an isotype control using the protocol described above in Example 1. Vector copy number is assessed using single-cell nested PCR as described in Example 1.

[0840] In some embodiments, mice treated with retroviral vectors have a greater average vector copy number in target cells than those from mice treated with vehicle. In some embodiments, mice treated with treated with retroviral vectors have a greater percent of target cells that received the vector than those from mice treated with vehicle.

### Example 4. Assaying Target Cells to Detect Specificity of Delivery of an Exogenous Protein Agent

[0841] This Example describes quantification of the expression of an exogenous protein agent in target recipient cells by exogenous protein agent expression in single cells.

[0842] In an embodiment, treated mice have greater exogenous protein agent expression in target cells than those from untreated mice. In an embodiment, treated mice have a greater percent of target cells that express the exogenous protein agent than those from untreated mice.

[0843] In this example, the target recipient cell is a CD3+ cell. However, this protocol may be adapted to any cell type for which suitable surface markers exist and which can be isolated from the subject. Notably, the methods described herein may be equally applicable to humans, rats, monkeys with optimization to the protocol. In this example the exogenous protein agent is a fluorescent protein and expression is measured via flow cytometry. In other embodiments, the expression of an exogenous protein agent may be measured with immunostaining for the protein. In other embodiments expression of the exogenous protein agent may be measured via microscopy or western blot.

[0844] Mice are treated with retroviral vector and a blood sample is collected as described above in Example 2. Cells are stained with a murine CD3:APC-Cy7 antibody (Biolegend Catalog #: 100330) or isotype controls and analyzed by flow cytometry using the protocol described in Example 2.

[0845] The percent of CD3+ cells that are tdtomato positive is measured. In some embodiments, the percent of CD3+ cells that are tdtomato positive is greater in cells from treated than untreated mice. The median tdtomato fluorescence level is measured in CD3+ cells. In some embodiments, the median tdtomato fluorescence level in CD3+ cells is greater in cells from treated than untreated mice.

### Example 5. Modification of Retroviral Vector with HLA-G or HLA-E for Decreased Cytotoxicity Mediated by PBMC Cell Lysis

[0846] This Example describes retroviral vectors derived from cells modified to have decreased cytotoxicity due to cell lysis by peripheral blood mononuclear cells (PBMCs).

[0847] In an embodiment, cytotoxicity mediated cell lysis of retroviral vectors by PBMCs is a measure of immunogenicity of retroviral vectors, as lysis will reduce, e.g., inhibit or stop, the activity of a retroviral vector.

[0848] Retroviral vectors are created from: unmodified cells (hereinafter NMCs, positive control), cells that are transfected with HLA-G or HLA-E cDNA (hereinafter NMC-HLA-G), and cells transfected with an empty vector control (hereinafter NMC-empty vector, negative control).

[0849] PBMC mediated lysis of a retroviral vector is determined by europium release assays as described in Bouma, et al. Hum. Immunol. 35(2):85-92; 1992 & van Besouw et al. Transplantation 70(1):136-143; 2000. PBMCs (hereinafter effector cells) are isolated from an appropriate donor, and stimulated with allogeneic gamma irradiated PMBCs and 2001 U/mL IL-2 (proleukin, Chiron BV Amsterdam, The Netherlands) in a round bottom 96 well plate for 7 days at 37° C. The retroviral vectors are labeled with europium-diethylenetriaminepentaacetate (DTPA) (sigma, St. Louis, Mo., USA).

[0850] At day 7 cytotoxicity-mediated lysis assays is performed by incubating ⁶³Eu-labelled retroviral vector with effector cells in a 96-well plate for 1, 2, 3, 4, 5, 6, 8, 10, 15, 20, 24, or 48 hours after plating at effector/target ratios ranging from 1000:1-1:1 and 1:1.25-1:1000. After incubation, the plates are centrifuged and a sample of the supernatant is transferred to 96-well plates with low background fluorescence (fluoroimmunoplates, Nunc, Roskilde, Denmark).

[0851] Subsequently, enhancement solution (PerkinElmer, Groningen, The Netherlands) is added to each well. The released europium is measured in a time-resolved fluorometer (Victor 1420 multilabel counter, LKB-Wallac, Finland). Fluorescence is expressed in counts per second

[0852] (CPS). Maximum percent release of europium by a target retroviral vector is determined by incubating an appropriate number (1×10²-1×10⁸) of retroviral vectors with 1% triton (sigma-aldrich) for an appropriate amount of time. Spontaneous release of europium by target retroviral vector is measured by incubation of labeled target retroviral vector without effector cells. Percentage leakage is then calculated as: (spontaneous release/maximum release)×100%. The percentage of cytotoxicity mediated lysis is calculated as % lysis=[(measured lysis−spontaneous lysis−spontaneous release)/(maximum release−spontaneous release)]×100%. The data is analyzed by looking at the percentage of lysis as a function of different effector target ratios.

[0853] In an embodiment, retroviral vectors generated from NMC-HLA-G cells will have a decreased percentage of lysis by target cells at specific timepoints as compared to retroviral vectors generated from NMCs or NMC-empty vector.

### Example 6. Modification of Retroviral Vector with HLA-G or HLA-E for Decreased NK Lysis Activity

[0854] This Example describes the generation of a retroviral vector composition derived from a cell source which has been modified to decrease cytotoxicity mediated cell lysis by NK cells. In an embodiment cytotoxicity mediated cell lysis of retroviral vectors by NK cells is a measure of immunogenicity for retroviral vectors.

[0855] Retroviral vectors are created from: unmodified cells (hereinafter NMCs, positive control), cells that are transfected with HLA-G or HLA-E cDNA (hereinafter NMC-HLA-G), and cells transfected with an empty vector control (hereinafter NMC-empty vector, negative control).

[0856] NK cell mediated lysis of a retroviral vector is determined by europium release assays as described in Bouma, et al. Hum. Immunol. 35(2):85-92; 1992 & van Besouw et al. Transplantation 70(1):136-143; 2000. NK cells (hereinafter effector cells) are isolated from an appropriate donor according to the methods in Crop et al. Cell transplantation (20):1547-1559; 2011, and stimulated with allogeneic gamma irradiated PMBCs and 2001 U/mL IL-2 (proleukin, Chiron BV Amsterdam, The Netherlands) in a round bottom 96 well plate for 7 days at 37° C. The retroviral vectors are labeled with europium-diethylenetriaminepentaacetate (DTPA) (sigma, St. Louis, Mo., USA). Cytotoxicity-mediated lysis assays and data analysis are performed as described above in Example 5.

[0857] In an embodiment, retroviral vectors generated from NMC-HLA-G cells will have a decreased percentage of lysis by target cells at specific timepoints as compared to retroviral vectors generated from NMCs or NMC-empty vector.

### Example 7. Modification of Retroviral Vector with HLA-G or HLA-E for Decreased CD8 Killer T Cell Lysis

[0858] This Example describes the generation of a retroviral vector composition derived from a cell source which has been modified to decrease cytotoxicity mediated cell lysis by CD8+ T-cells. In an embodiment, cytotoxicity mediated cell lysis of retroviral vector by CD8+ T-cells is a measure of immunogenicity for retroviral vectors.

[0859] Retroviral vectors are created from: unmodified cells (hereinafter NMCs, positive control), cells that are transfected with HLA-G or HLA-E cDNA (hereinafter NMC-HLA-G), and cells transfected with an empty vector control (hereinafter NMC-empty vector, negative control).

[0860] CD8+ T cell mediated lysis of a retroviral vector is determined by europium release assays as described in Bouma, et al. Hum. Immunol. 35(2):85-92; 1992 & van Besouw et al. Transplantation 70(1):136-143; 2000. CD8+ T-cells (hereinafter effector cells) are isolated from an appropriate donor according to the methods in Crop et al. Cell transplantation (20):1547-1559; 2011, and stimulated with allogeneic gamma irradiated PMBCs and 200 IU/mL IL-2 (proleukin, Chiron BV Amsterdam, The Netherlands) in a round bottom 96 well plate for 7 days at 37° C. The retroviral vectors are labeled with europium-diethylenetriaminepentaacetate (DTPA) (sigma, St. Louis, Mo., USA). Cytotoxicity-mediated lysis assays and data analysis are performed as described above in Example 5.

[0861] In an embodiment, retroviral vectors generated from NMC-HLA-G cells will have a decreased percentage of lysis by target cells at specific timepoints as compared to retroviral vectors generated from NMCs or NMC-empty vector.

### Example 8: Modification of Retroviral Vector with CD47 to Evade Macrophage Phagocytosis

[0862] This Example describes quantification of the evasion of phagocytosis by modified retroviral vector. In an embodiment, modified retroviral vector will evade phagocytosis by macrophages.

[0863] Cells engage in phagocytosis, engulfing particles, enabling the sequestration and destruction of foreign invaders, like bacteria or dead cells. In some embodiments, phagocytosis of lentiviral vectors by macrophages would reduce their activity. In some embodiments, phagocytosis of lentiviral vectors is a measure of immunogenicity of retroviral vectors.

[0864] Retroviral vectors are produced from cells which lack CD47 (hereinafter NMC, positive control), cells that are transfected with CD47 cDNA (hereinafter NMC-CD47), and cells transfected with an empty vector control (hereinafter NMC-empty vector, negative control). Prior to retroviral vector production, the cells are labeled with CSFE.

[0865] Reduction of macrophage mediated immune clearance is determined with a phagocytosis assay according to the following protocol. Macrophages are plated immediately after harvest in confocal glass bottom dishes. Macrophages are incubated in DMEM+10% FBS+1% P/S for 1 h to attach. An appropriate number of retroviral vectors produced from NMC, NMC-CD47, NMC-empty vector are added to the macrophages as indicated in the protocol, and are incubated for 2 h, tools.thermofisher.com/content/sfs/manuals/mp06694.pdf.

[0866] After 2 h, the dish is gently washed and intracellular fluorescence is examined. Intracellular fluorescence emitted by engulfed retroviral particles is imaged by confocal microscopy at 488 excitation. The number of phagocytotic positive macrophage is quantified using imaging software. The data is expressed as the phagocytic index=(total number of engulfed cells/total number of counted macrophages)×(number of macrophages containing engulfed cells/total number of counted macrophages)×100.

[0867] In an embodiment, the phagocytic index will be reduced when macrophages are incubated with retroviral vectors derived from NMC-CD47, versus those derived from NMC, or NMC-empty vector.

### Example 9: Modification of Retroviral Vector with Complement Regulatory Proteins to Evade Complement

[0868] This Example describes quantification of complement activity against a retroviral vector using an in vitro assay. In some embodiments a modified retroviral vector described herein will have reduced complement activity compared to an unmodified retroviral vector.

[0869] In this Example, serum from a mouse is assessed for complement activity against a retroviral vector. The example measures the level of complement C3a, which is a central node in all complement pathways. The methods described herein may be equally applicable to humans, rats, monkeys with optimization to the protocol.

[0870] In this example, retroviral vectors are generated from HEK293 cells transfected with a cDNA coding for complement regulatory protein DAF (HEK293-DAF retroviral vector) or HEK 293 cells not expressing a complementary regulatory protein (HEK293 retroviral vector). In other embodiments, other complement regulatory proteins may be used, such as proteins that bind decay-accelerating factor (DAF, CD55), e.g. factor H (FH)-like protein-1 (FHL-1), e.g. C4b-binding protein (C4BP), e.g. complement receptor 1 (CD35), e.g. Membrane cofactor protein (MCP, CD46), eg. Profectin (CD59), e.g. proteins that inhibit the classical and alternative complement pathway CD/C5 convertase enzymes, e.g. proteins that regulate MAC assembly.

[0871] Serum is recovered from naïve mice, mice that are administered HEK293-DAF retroviral vector, or mice that are administered HEK293 retroviral vector. Sera are collected from mice by collecting fresh whole blood and allowing it to clot completely for several hours. Clots are pelleted by centrifugation and the serum supernatants are removed. A negative control is heat inactivated mouse serum. Negative control samples are heated at 56 degrees Celsius for 1 hour. Serum may be frozen in aliquots.

[0872] The different retroviral vectors are tested for the dose at which 50% of cells in a target cell population receive the exogenous agent in the retroviral vector. The retroviral vector may contain any of the exogenous agents described herein. Many methods for assaying retroviral delivery of an exogenous agent to recipient cells are also described herein. In this particular example, the exogenous agent is Cre protein (encoded by the retroviral nucleic acid) and the target cells are RPMI8226 cells which stably-express a “LoxP-GFP-stop-LoxP-RFP” cassette under a CMV promoter, which upon recombination by Cre switches from GFP to RFP expression, as a marker of delivery. The identified dose at which 50% of the recipient cells are RFP positive is used for further experiments. In some embodiments, the identified dose at which 50% of recipient cells receive the exogenous agent will be similar across retroviral vectors.

[0873] Two-fold dilutions in phosphate-buffered saline (PBS, pH 7.4) of the retroviral vectors, starting at the dose of retroviral vectors at which 50% of the target cells receive the exogenous agent, are mixed with a 1:10 dilution of the sera from mice treated with the same retroviral vectors or naïve mice (assay volume, 20 μl) and incubated for 1 h at 37° C. The samples are further diluted 1:500 and used in an enzyme-linked immunosorbent assay (ELISA) specific for C3a. The ELISA is mouse complement C3a ELISA Kit product LS-F4210 sold by LifeSpan BioSciences Inc, which measures the concentration of C3a in a sample. The dose of retroviral vector at which 200 pg/ml of C3a is present is compared across sera isolated from mice.

[0874] In some embodiments, the dose of retroviral vector at which 200 pg/ml of C3a is present will be greater for HEK293-DAF retroviral vector incubated with HEK-293 DAF mouse sera than for HEK293 retroviral vector incubated with HEK293 mouse sera, indicating that complement activity targeting retroviral vector is greater in mice treated with HEK293 retroviral vector than HEK293-DAF retroviral vector. In some embodiments, the dose of retroviral vector at which 200 pg/ml of C3a is present will be greater for HEK293-DAF retroviral vector incubated with naive mouse sera than for HEK293 retroviral vector incubated with naive mouse sera, indicating that complement activity targeting retroviral vector is greater in mice treated with HEK293 retroviral vector than HEK293-DAF retroviral vector.

### Example 10: Modification of Retroviral Vector to Knockdown Immunogenic Protein to Reduce Immunogenicity

[0875] This Example describes the generation of a retroviral vector composition derived from a cell source which has been modified to reduce expression of a molecule which is immunogenic, and quantification of the reduced expression. In an embodiment, a retroviral vector can be derived from a cell source, which has been modified to reduce expression of a molecule which is immunogenic.

[0876] Therapies that stimulate an immune response can reduce the therapeutic efficacy or cause toxicity to the recipient. Thus, immunogenicity is an important property for a safe and effective therapeutic retroviral vectors. Expression of certain immune activating agents can create an immune response. MHC class I represents one example of an immune activating agent.

[0877] Retroviral vectors are produced from unmodified cells which normally express MHC-1 (hereinafter NMC, positive control), cells that are transfected with a DNA coding for a shRNA targeting MHC class I (hereinafter NMC-shMHC class I), and cells transfected with a DNA coding for non-targeted scrambled shRNA vector control (hereinafter NMC-vector control, negative control). Prior to retroviral production, the cells are labeled with CSFE.

[0878] Retroviral vectors are assayed for expression of MHC class I using flow cytometry. An appropriate number of retroviral vectors are washed and resuspended in PBS, held on ice for 30 minutes with 1: 10-1: 4000 dilution of fluorescently conjugated monoclonal antibodies against MHC class I (Harlan Sera-Lab, Belton, UK). Retroviral vectors are washed three times in PBS and resuspended in PBS. Nonspecific fluorescence is determined, using equal aliquots of retroviral vector preparation incubated with and appropriate fluorescently conjugated isotype control antibody at equivalent dilutions. Retroviral vectors are assayed in a flow cytometer (FACSort, Becton-Dickinson) and the data is analyzed with flow analysis software (Becton-Dickinson).

[0879] The mean fluorescence data of the retroviral vectors derived from NMCs, NMC-shMHC class I, and NMC-vector control, is compared. In an embodiment, retroviral vectors derived from NMC-shMHC class I will have lower expression of MHC class I compared to NMCs and NMC-vector control.

### Example 11: Measuring Pre-Existing Serum Inactivation of Retroviral Vectors

[0880] This Example describes quantification of pre-existing serum inactivation of retroviral vectors using an in vitro delivery assay.

[0881] In some embodiments, a measure of immunogenicity for retroviral vectors is serum inactivation. Serum inactivation of retroviral vectors may be due to antibody-mediated neutralization or complement mediated degradation. In an embodiment, some recipients of a retroviral vectors described herein will have factors in their serum which bind to and inactivate retroviral vectors.

[0882] In this Example, a retroviral vector naïve mouse is assessed for the presence of factors that inactivate retroviral vectors in serum. Notably, the methods described herein may be equally applicable to humans, rats, monkeys with optimization to the protocol.

[0883] The negative control is heat inactivated mouse serum and the positive control is serum derived from a mouse that has received multiple injections of retroviral vector generated from a xenogeneic source cell. Sera are collected from mice by collecting fresh whole blood and allowing it to clot completely for several hours. Clots are pelleted by centrifugation and the serum supernatants are removed. Negative control samples are heated at 56 degrees Celsius for 1 hour. Serum may be frozen in aliquots.

[0884] The retroviral vectors are tested for the dose at which 50% of cells in a target cell population receive the exogenous agent in the retroviral vector, as described above in Example 9.

[0885] To assess serum inactivation of retroviral vectors, retroviral vectors are diluted 1:5 into normal or heat-inactivated serum (or medium containing 10% heat-inactivated FBS as the no-serum control) and the mixture is incubated at 37° C. for 1 h. Following the incubation, medium is added to the reaction for an additional 1:5 dilution and then serially diluted twice at a 1:10 ratio. Following this step, the retroviral vectors should be present at the previously identified dose at which 50% of the recipient cells have received the exogenous agent (e.g. are RFP positive).

[0886] Retroviral vectors that have been exposed to serum are then incubated with target cells. The percent of cells which receive the exogenous agent, and thus are RFP positive, is calculated. In some embodiments, the percent of cells which receive the exogenous agent will not be different between retroviral vector samples that have been incubated with serum and heat-inactivated serum from retroviral vector naïve mice, indicating that there is not serum inactivation of retroviral vector. In some embodiments, the percent of cells which receive the exogenous agent will not be different between retroviral vector samples that have been incubated with serum from retroviral vector naïve mice and no-serum control incubations, indicating that there is not serum inactivation of retroviral vectors. In some embodiments, the percent of cells which receive the exogenous agent will be less in retroviral vector samples that have been incubated with positive control serum than in retroviral vector samples that have been incubated with serum from retroviral vector naïve mice, indicating that there is not serum inactivation of retroviral vectors.

### Example 12: Measuring Serum Inactivation of Retroviral Vectors after Multiple Administrations

[0887] This Example describes quantification of serum inactivation of retroviral vectors using an in vitro delivery assay following multiple administrations of the retroviral vectors. In an embodiment, a modified retroviral vector, e.g., modified by a method described herein, will have a reduced (e.g., reduced compared to administration of an unmodified retroviral vector) serum inactivation following multiple (e.g., more than one, e.g., 2 or more) administrations of the modified retroviral vector. In an embodiment, a retroviral vector described herein will not be inactivated by serum following multiple administrations.

[0888] In some embodiments, a measure of immunogenicity for retroviral vector is serum inactivation. In an embodiment, repeated injections of a retroviral vector can lead to the development of anti-retroviral vector antibodies, e.g., antibodies that recognize retroviral vectors. In an embodiment, antibodies that recognize retroviral vectors can bind in a manner that can limit retroviral vector activity or longevity and mediate complement degradation.

[0889] In this Example, serum inactivation is examined after one or more administrations of retroviral vectors. Retroviral vectors are produced by any one of the previous Examples. In this example, retroviral are created from: cells that are transfected with HLA-G or HLA-E cDNA (hereinafter NMC-HLA-G), and cells transfected with an empty vector control (hereinafter NMC-empty vector, negative control). In some embodiments, retroviral vectors are derived from cells that are expressing other immunoregulatory proteins.

[0890] Serum is drawn from different cohorts: mice injected systemically and/or locally with 1, 2, 3, 5, or 10 injections of vehicle (retroviral vector naïve group), HEK293-HLA-G retroviral vector, or HEK293 retroviral vector. Sera are collected from mice by collecting fresh whole blood and allowing it to clot completely for several hours. Clots are pelleted by centrifugation and the serum supernatants are removed. A negative control is heat inactivated mouse serum. Negative control samples are heated at 56 degrees Celsius for 1 hour. Serum may be frozen in aliquots.

[0891] The retroviral vectors are tested for the dose at which 50% of cells in a target cell population receive the exogenous agent in the retroviral vector, as described above in Example 9.

[0892] To assess serum inactivation of retroviral vectors, retroviral vectors are exposed to serum and incubated with target cells as described in Example 11 above.

[0893] The percent of cells which receive the exogenous agent, and thus are RFP positive, is calculated. In some embodiments, the percent of cells which receive the exogenous agent will not be different between retroviral vector samples that have been incubated with serum and heat-inactivated serum from mice treated with HEK293-HLA-G retroviral vectors, indicating that there is not serum inactivation of retroviral vectors or an adaptive immune response. In some embodiments, the percent of cells which receive the exogenous agent will not be different between retroviral vector samples that have been incubated from mice treated 1, 2, 3, 5 or 10 times with HEK293-HLA-G retroviral vectors, indicating that there is not serum inactivation of retroviral vectors or an adaptive immune response. In some embodiments, the percent of cells which receive the exogenous agent will not be different between retroviral vector samples that have been incubated with serum from mice treated with vehicle and from mice treated with HEK293-HLA-G retroviral vectors, indicating that there is not serum inactivation of retroviral vectors or an adaptive immune response. In some embodiments, the percent of cells which receive the exogenous agent will be less for retroviral vectors derived from HEK293 than for HEK293-HLA-G retroviral vectors indicating that there is not serum inactivation of HEK293-HLA-G retroviral vectors or an adaptive immune response.

### Example 13: Measuring Pre-Existing IgG and IgM Antibodies Reactive Against Retroviral Vectors

[0894] This Example describes quantification of pre-existing anti-retroviral vector antibody titers measured using flow cytometry.

[0895] In some embodiments, a measure of immunogenicity for a retroviral vector is antibody responses. Antibodies that recognize retroviral vector can bind in a manner that can limit retroviral vector activity or longevity. In an embodiment, some recipients of a retroviral vector described herein will have pre-existing antibodies which bind to and recognize retroviral vector.

[0896] In this Example, anti-retroviral vector antibody titers are tested using retroviral vector produced using a xenogeneic source cell. In this Example, a retroviral vector naïve mouse is assessed for the presence of anti-retroviral vector antibodies. Notably, the methods described herein may be equally applicable to humans, rats, monkeys with optimization to the protocol.

[0897] The negative control is mouse serum which has been depleted of IgM and IgG, and the positive control is serum derived from a mouse that has received multiple injections of retroviral vector generated from a xenogeneic source cell.

[0898] To assess the presence of pre-existing antibodies which bind to retroviral vector, sera from retroviral vector-naïve mice is first decomplemented by heating to 56° C. for 30 min and subsequently diluted by 33% in PBS containing 3% FCS and 0.1% NaN3. Equal amounts of sera and retroviral vector (1×10²-1×10⁸ retroviral vectors per mL) suspensions are incubated for 30 min at 4° C. and washed with PBS through a calf-serum cushion.

[0899] IgM xenoreactive antibodies are stained by incubation of the retroviral vector with PE-conjugated goat antibodies specific for the Fc portion of mouse IgM (BD Bioscience) at 4° C. for 45 min. Notably, anti-mouse IgG1 or IgG2 secondary antibodies may also be used. Retroviral vector from all groups are washed twice with PBS containing 2% FCS and then analyzed on a FACS system (BD Biosciences). Fluorescence data are collected by use of logarithmic amplification and expressed as mean fluorescent intensity.

[0900] In an embodiment, the negative control serum will show negligible fluorescence comparable to the no serum or secondary alone controls. In an embodiment, the positive control will show more fluorescence than the negative control, and more than the no serum or secondary alone controls. In an embodiment, in cases where immunogenicity occurs, serum from retroviral vector-naïve mice will show more fluorescence than the negative control. In an embodiment, in cases where immunogenicity does not occur, serum from retroviral vector-naïve mice will show similar fluorescence compared to the negative control.

### Example 14: Measuring IgG and IgM Antibody Responses after Multiple Administrations of Retroviral Vectors

[0901] This Example describes quantification of the humoral response of a modified retroviral vector following multiple administrations of the modified retroviral vector. In an embodiment, a modified retroviral vector, e.g., modified by a method described herein, will have a reduced (e.g., reduced compared to administration of an unmodified retroviral vector) humoral response following multiple (e.g., more than one, e.g., 2 or more), administrations of the modified retroviral vector.

[0902] In some embodiments, a measure of immunogenicity for a retroviral vector is the antibody responses. In an embodiment, repeated injections of a retroviral vector can lead to the development of anti-retroviral vector antibodies, e.g., antibodies that recognize retroviral vector. In an embodiment, antibodies that recognize retroviral vector can bind in a manner that can limit retroviral vector activity or longevity.

[0903] In this Example, anti-retroviral vector antibody titers are examined after one or more administrations of retroviral vector. Retroviral vector is produced by any one of the previous Examples. In this example, retroviral are created from: cells that are not transfected with an immunomodulatory protein (NMCs), cells that are transfected with HLA-G or HLA-E cDNA (hereinafter NMC-HLA-G), and cells transfected with an empty vector control (hereinafter NMC-empty vector, negative control). In some embodiments, retroviral vectors are derived from cells that are expressing other immunoregulatory proteins.

[0904] Serum is drawn from different cohorts: mice injected systemically and/or locally with 1, 2, 3, 5, 10 injections of vehicle (retroviral vector naïve group), NMC retroviral vector, NMC-HLA-G retroviral vector, or NMC-empty vectors retroviral vector.

[0905] To assess the presence and abundance of anti-retroviral vector antibodies, sera from the mice is first decomplemented by heating to 56° C. for 30 min and subsequently diluted by 33% in PBS with 3% FCS and 0.1% NaN3. Equal amounts of sera and retroviral vector (1×10²-1×10⁸ retroviral vector per mL) are incubated for 30 min at 4° C. and washed with PBS through a calf-serum cushion.

[0906] Retroviral vector reactive IgM antibodies are stained by incubation of the retroviral vector with PE-conjugated goat antibodies specific for the Fc portion of mouse IgM (BD Bioscience) at 4° C. for 45 min. Notably, anti-mouse IgG1 or IgG2 secondary antibodies may also be used. Retroviral vector from all groups are washed twice with PBS containing 2% FCS and then analyzed on a FACS system (BD Biosciences). Fluorescence data are collected by use of logarithmic amplification and expressed as mean fluorescent intensity.

[0907] In an embodiment, NMC-HLA-G retroviral vectors will have decreased anti-viral IgM (or IgG1/2) antibody titers (as measured by fluorescence intensity on FACS) after injections, as compared to NMC retroviral vectors or NMC-empty retroviral vectors.

### Example 15: Measuring IgG and IgM Titers Antibody Responses to Retroviral Vector Recipient Cells

[0908] This Example describes quantification of antibody titers against recipient cells (cells that have fused with retroviral vectors) using flow cytometry. In some embodiments, a measure of the immunogenicity of recipient cells is the antibody response. Antibodies that recognize recipient cells can bind in a manner that can limit cell activity or longevity. In an embodiment, recipient cells will not be targeted by an antibody response, or an antibody response will be below a reference level.

[0909] In this Example, anti-recipient cell antibody titers in a subject (e.g., human, rat, or monkey) are tested. In addition, the protocol may be adapted to any cell type for which suitable surface markers exist. In this example, the target recipient cell is a CD3+ cell.

[0910] Mice are treated with retroviral vectors produced via any of the methods described in this application or with PBS (negative control) daily for 5 days. 28 days following the final treatment, peripheral blood is collected from mice that received retroviral vectors and mice that received PBS treatment. Blood is collected into 1 ml PBS containing 5 μM EDTA and mixed immediately to prevent clotting. The tubes are kept on ice and red blood cells are removed using a buffered ammonium chloride (ACK) solution. Cells are stained with a murine CD3-FITC antibody (Thermo Fisher Catalog #:11-0032-82), at 4° C. for 30 minutes in the dark, after being blocked with bovine serum albumin for 10 minutes. After being washed two times with PBS, cells are analyzed on a LSR II (BD Biosciences, San Jose, Calif.) with 488 nm laser excitation and emission collected at 530+/−30 nm running the FACSDiva™ software (BD Biosciences, San Jose, Calif.). CD3+ cells are sorted.

[0911] The sorted CD3+ cells are then stained with IgM antibodies by incubation of the reaction mixture with PE-conjugated goat antibodies specific for the Fc portion of mouse IgM (BD Bioscience) at 4° C. for 45 min. Notably, anti-mouse IgG1 or IgG2 secondary antibodies may also be used. Cells from all groups are washed twice with PBS containing 2% FCS and then analyzed on a FACS system (BD Biosciences). Fluorescence data are collected by use of logarithmic amplification and expressed as mean fluorescent intensity. The mean fluorescence intensity is calculated for the sorted CD3 cells from mice treated with retroviral vectors and the mice treated with PBS.

[0912] A low mean fluorescence intensity is indicative of a low humoral response against the recipient cells. Mice treated with PBS are expected to have low mean fluorescence intensity. In an embodiment, the mean fluorescence intensity will be similar for recipient cells from mice treated with retroviral vectors and mice treated with PBS.

### Example 16: Measuring Phagocytic Response to Retroviral Vector Recipient Cells

[0913] This Example describes quantification of macrophage response against recipient cells with a phagocytosis assay.

[0914] In some embodiments, a measure of the immunogenicity of recipient cells is the macrophage response. Macrophages engage in phagocytosis, engulfing cells and enabling the sequestration and destruction of foreign invaders, like bacteria or dead cells. In some embodiments, phagocytosis of recipient cells by macrophages would reduce their activity.

[0915] In an embodiment, recipient cells are not targeted by macrophages. In this Example, the macrophage response against recipient cells in a subject is tested. In addition, the protocol may be adapted to any cell type for which suitable surface markers exist. In this example, the target recipient cell is a CD3+ cell.

[0916] Mice are treated with retroviral vectors produced via any of the methods described in this application or with PBS (negative control) daily for 5 days. 28 days following the final treatment, peripheral blood is collected from mice that received retroviral vectors and mice that received PBS treatment. Blood is collected into 1 ml PBS containing 5 μM EDTA and mixed immediately to prevent clotting. The tubes are kept on ice and red blood cells are removed using a buffered ammonium chloride (ACK) solution.

[0917] Cells are stained with a murine CD3-FITC antibody (Thermo Fisher Catalog #:11-0032-82), at 4° C. for 30 minutes in the dark, after being blocked with bovine serum albumin for 10 minutes. After being washed two times with PBS, cells are analyzed on a LSR II (BD Biosciences, San Jose, Calif.) with 488 nm laser excitation and emission collected at 530+/−30 nm running the FACSDiva™ software (BD Biosciences, San Jose, Calif.). CD3+ cells are then sorted.

[0918] A phagocytosis assay is run to assess macrophage mediated immune clearance according to the following protocol. Macrophages are plated immediately after harvest in confocal glass bottom dishes. Macrophages are incubated in DMEM+10% FBS+1% P/S for 1 h to attach. An appropriate number of sorted and FITC-stained CD3+ cells derived from mice that received retroviral vectors and PBS are added to the macrophages as indicated in the protocol, and are incubated for 2 h, e.g., as described in the Vybrant™ Phagocytosis Assay Kit product information insert (Molecular Probes, revised 18 Mar. 2001, found at tools.thermofisher.com/content/sfs/manuals/mp06694.pdf).

[0919] After 2 h, the dish is gently washed and intracellular fluorescence is examined. To identify macrophages, cells are first incubated with Fc-receptor blocking antibody (eBioscence cat. no. 14-0161-86, clone 93) for 15 min on ice to block the binding of labeled mAbs to Fc receptors, which are abundantly expressed on macrophages. Following this step anti-F4/80-PE (ThermoFisher cat. No. 12-4801-82, clone BM8) and anti-CD11b-PerCP-Cy5.5 (BD Biosciences cat. No. 550993, clone M1/70) conjugated antibodies are added to stain macrophage surface antigens. Cells are incubated for 30 min in the dark at 4C followed by centrifugation and washing in PBS. The cells are then resuspended in PBS. Flow cytometry of samples is then performed and macrophages are identified via positive fluorescence signal for F4/80-PE and CD11b-PerCP-Cy5.5 using 533 nm and 647 nm laser excitation, respectively. After gating for macrophages, intracellular fluorescence emitted by engulfed recipient cells is assessed by 488 nm laser excitation. The number of phagocytotic positive macrophage is quantified using imaging software. The data is expressed as the phagocytic index=(total number of engulfed cells/total number of counted macrophages)×(number of macrophages containing engulfed cells/total number of counted macrophages)×100.

[0920] A low phagocytic index is indicative of low phagocytosis and targeting by macrophages. Mice treated with PBS are expected to have a low phagocytic index. In an embodiment, the phagocytic index will be similar for recipient cells derived from mice treated with retroviral vectors and mice treated with PBS.

### Example 17: Measuring PBMC Response to Retroviral Vector Recipient Cells

[0921] This Example describes quantification of a PBMC response against recipient cells with a cell lysis assay.

[0922] In some embodiments, a measure of the immunogenicity of recipient cells is the PBMC response. In an embodiment, cytotoxicity mediated cell lysis of recipient cells by PBMCs is a measure of immunogenicity, as lysis will reduce, e.g., inhibit or stop, the activity of a retroviral vector.

[0923] In an embodiment, recipient cells do not elicit a PBMC response. In this Example, the PBMC response against recipient cells in a subject is tested.

[0924] In addition, the protocol may be adapted to any cell type for which suitable surface markers exist. In this example, the target recipient cell is a CD3+ cell.

[0925] Mice are treated with retroviral vector produced via any of the methods described in this application or with PBS (negative control) daily for 5 days. 28 days following the final treatment, peripheral blood is collected from mice that received retroviral vector and mice that received PBS treatment. Blood is collected into 1 ml PBS containing 5 μM EDTA and mixed immediately to prevent clotting. The tubes are kept on ice and red blood cells are removed using a buffered ammonium chloride (ACK) solution. Cells are stained with a murine CD3:APC-Cy7 antibody (Biolgend Catalog #: 100330) or an isotype control APC-Cy7 (IC:APC-Cy7) antibody (Biolgend Catalog #: 400230) at 4° C. for 30 minutes in the dark, after being Fc blocked (Biolgend Catalog #: 101319) in cell staining buffer (Biolgend Catalog #: 420201) for 10 minutes. After being washed two times with PBS, cells are analyzed on a FACS Aria (BD Biosciences, San Jose, Calif.) with 640 nm laser excitation and emission collected at 780−/+60 nm running the FACSDiva™ software (BD Biosciences, San Jose, Calif.) to set negative gates using the isotype control APC-Cy7 antibody labelled cells and then APC-Cy7 postive cells are sorted and collected. Sorted CD3+ cells are then labelled with either CellMask™ Green Plasma membrane Stain (CMG, ThermoFisher Catalog #: C37608) or DMSO as the negative control.

[0926] 7 days prior to the isolation of CD3+ cells from the mice treated with retroviral vector or PBS, PBMCs are isolated from mice treated with retroviral vector or PBS according to the methods in Crop et al. Cell transplantation (20):1547-1559; 2011 and simulated in the presence of IL-2 recombinant mouse protein (R&D Systems Catalog #: 402-ML-020) and CD3/CD28 beads (ThermoFisher Catalog #: 11456D) in a round bottom 96 well plate for 7 days at 37 C. At day 7, the stimulated PBMCs are co-incubated with CD3+/CMG+ or CD3+/DMSO control cells for 1, 2, 3, 4, 5, 6, 8, 10, 15, 20, 24, 48 hours at a plating ratio of PBMC:CD3+/CMG+ or PBMC:CD3+/DMSO control cells ranging from 1000:1-1:1 and 1:1.25-1:1000. As a negative control a set of wells would receive CD3+/CMG+ and CD3+/DMSO control cells only, no PBMCs. After incubation, the plates are centrifuged and processed so that they are labelled with either murine CD3:APC-Cy7 antibody or an IC:APC-Cy7 antibody as per above. After being washed two times with PBS, cells are re-suspended in PBS and analyzed on a FACS Aria (APC-Cy7: 640 nm laser excitation/emission collected at 780−/+60 nm and CMG 561 nm laser excitation/emission collected at 585−/+16 nm) running the FACSDiva™ software (BD Biosciences, San Jose, Calif.). The FSC/SSC event data would then be used initially to set the gate for events labelled “cells”. This “cells” gate would be then used to display events to set the PMT voltage for the the 640 nm and 561 nm laser analyzing samples labelled with IC:APC-Cy7/DMSO only. This sample would also be used to set the gates for negative cells for both APC-Cy7 and CMG. The CD3+/CMG+ cells that did not receive any PBMCs would then used to set the positive gates for CD3+ and CMG+ cells.

[0927] The data is analyzed by looking at the percentage of CD3+/CMG+ cells in the population of total cells. When comparing treatment groups, a relatively lower percentage of CD3+/CMG+ cells at any given assay ratio of PBMC:CD3+/CMG+ cells is indicative of recipient cell lysis. In an embodiment, the percent of CD3+/CMG+ will be similar for recipient cells derived from mice treated with retroviral vector and mice treated with PBS.

### Example 18: Measuring NK Cell Response to Retroviral Vector Recipient Cells

[0928] This Example describes quantification of a natural killer cell response against recipient cells with a cell lysis assay.

[0929] In some embodiments, a measure of the immunogenicity of recipient cells is the natural killer cell response. In an embodiment, cytotoxicity mediated cell lysis of recipient cells by natural killer cells is a measure of immunogenicity, as lysis will reduce, e.g., inhibit or stop, the activity of a retroviral vector.

[0930] In an embodiment, recipient cells do not elicit a natural killer cell response. In this Example, the natural killer response against recipient cells in a subject is tested. In addition, the protocol may be adapted to any cell type for which suitable surface markers exist. In this example, the target recipient cell is a CD3+ cell.

[0931] Mice are treated with retroviral vector, a blood sample is drawn, and CD3+ cells are sorted as described above in Example 17. NK cells are isolated, cultured with the CD3+ cells, and analyzed by FACS according to the protocol described above in Example 17 except that NK cells are used in place of the PBMC cells used in Example 17.

[0932] The data is analyzed by looking at the percentage of CD3+/CMG+ cells in the population of total cells. When comparing treatment groups, a relatively lower percentage of CD3+/CMG+ cells at any given assay ratio of NK cells:CD3+/CMG+ cells is indicative of recipient cell lysis. In an embodiment, the percent of CD3+/CMG+ will be similar for recipient cells derived from mice treated with retroviral vector and mice treated with PBS.

### Example 19: Measuring CD8 T Cell Response to Retroviral Vector Recipient Cells

[0933] This Example describes quantification of a CD8+ T cell response against recipient cells (cells that have fused with retroviral vectors) with a cell lysis assay.

[0934] In some embodiments, a measure of the immunogenicity of recipient cells is the CD8+ T cell response. In an embodiment, cytotoxicity mediated cell lysis of recipient cells by CD8+ T cells is a measure of immunogenicity, as lysis will reduce, e.g., inhibit or stop, the activity of a retroviral vector.

[0935] In an embodiment, recipient cells do not elicit a CD8+ T cell response. In this Example, the CD8+ T cell response against recipient cells in a subject is tested. In addition, the protocol may be adapted to any cell type for which suitable surface markers exist. In this example, the target recipient cell is a CD3+ cell.

[0936] Mice are treated with retroviral vector, a blood sample is drawn, and CD3+ cells are sorted as described above in Example 17. CD8+ T cells are isolated, cultured with the CD3+ cells, and analyzed by FACS according to the protocol described above in Example 17 except that CD8+ T cells are used in place of the PBMC cells used in Example 17.

[0937] The data is analyzed by looking at the percentage of CD3+/CMG+ cells in the population of total cells. When comparing treatment groups, a relatively lower percentage of CD3+/CMG+ cells at any given assay ratio of CD8+ cells:CD3+/CMG+ cells is indicative of recipient cell lysis. In an embodiment, the percent of CD3+/CMG+ will be similar for recipient cells derived from mice treated with retroviral vectors and mice treated with PBS.

### Example 20: Measuring HSC Specific Promoter Activity

[0938] This Example describes the measurement of the activity of a HSC specific promoter (a positive TCSRE) in HSCs compared to non-target cells.

[0939] The two cell types are cultured separately and treated with a retroviral vector produced as described herein. The retroviral vector is pseudotyped with a VSV-G and codes for tdtomato fluorescent protein reporter under the control of a HSC specific promoter, e.g., a HSC specific promoter of Table 3.

[0940] Two days after transduction, gene expression in the cells is measured via flow cytometry and the average vector copy number in the cells is measured with quantitative PCR. The median tdtomato gene expression per cell in the cell population is normalized to the population vector copy number.

[0941] In some embodiments, the population of HSCs will have a greater ratio of tdtomato expression to vector copy number than the population of non-target cells. This will demonstrate that the HSC-specific promoter is more active in HSCs.

### Example 21: Measuring Change in Expression from Restrictive microRNA

[0942] This Example describes the measurement of the activity of a non-target-cell-restrictive microRNA (a NTCSRE) in hematopoietic stem cells (HSCs) compared to non-target cells.

[0943] The two cell types are cultured separately and treated with a retroviral vector produced as described herein. The retroviral vector is pseudotyped with a VSV-G and codes for tdtomato fluorescent protein reporter under the control of a ubiquitously active promoter and a non-target-cell-restrictive microRNA, e.g., a microRNA of Table 4.

[0944] Two days after transduction, gene expression in the cells is measured via flow cytometry and the average vector copy number in the cells is measured with quantitative PCR. The median tdtomato gene expression per cell in the cell population is normalized to the population vector copy number.

[0945] In some embodiments, the population of HSCs will have a greater ratio of tdtomato expression to vector copy number than the population of non-target cells. This will demonstrate that the non-target-cell restrictive microRNA decreases expression in non-target cells.

### Example 22: Lack of Transcriptional Activity in Fusosomes

[0946] This Example quantifies transcriptional activity in fusosomes compared to parent cells, e.g., source cells, used for fusosome generation. In an embodiment, transcriptional activity will be low or absent in fusosomes compared to the parent cells, e.g., source cells.

[0947] Fusosomes are a chassis for the delivery of therapeutic agent. Therapeutic agents, such as miRNA, mRNAs, proteins and/or organelles that can be delivered to cells or local tissue environments with high efficiency could be used to modulate pathways that are not normally active or active at pathological low or high levels in recipient tissue. In an embodiment, the observation that fusosomes are not capable of transcription, or that fusosomes have transcriptional activity of less than their parent cell, will demonstrate that removal of nuclear material has sufficiently occurred.

[0948] Fusosomes are prepared by any one of the methods described in previous Examples. A sufficient number of fusosomes and parent cells used to generate the fusosomes are then plated into a 6 well low-attachment multiwell plate in DMEM containing 20% Fetal Bovine Serum, 1×Penicillin/Streptomycin and the fluorescent-taggable alkyne-nucleoside EU for 1 hr at 37° C. and 5% CO2. For negative controls, a sufficient number of fusosomes and parent cells are also plated in multiwell plate in DMEM containing 20% Fetal Bovine Serum, 1× Penicillin/Streptomycin but with no alkyne-nucleoside EU.

[0949] After the 1 hour incubation the samples are processed following the manufacturer's instructions for an imaging kit (ThermoFisher Scientific). The cell and fusosome samples including the negative controls are washed thrice with 1×PBS buffer and resuspended in 1×PBS buffer and analyzed by flow cytometry (Becton Dickinson, San Jose, Calif., USA) using a 488 nm argon laser for excitation, and the 530+/−30 nm emission. BD FACSDiva software was used for acquisition and analysis. The light scatter channels are set on linear gains, and the fluorescence channels on a logarithmic scale, with a minimum of 10,000 cells analyzed in each condition.

[0950] In an embodiment, transcriptional activity as measured by 530+/−30 nm emission in the negative controls will be null due to the omission of the alkyne-nucleoside EU. In some embodiments, the fusosomes will have less than about 70%, 60%, 50%, 40%, 30%, 20%, 10%, 5%, 4%, 3%, 2%, 1% or less transcriptional activity than the parental cells.

[0951] See also, Proc Natl Acad Sci USA, 2008, October 14; 105(41):15779-84. doi: 10.1073/pnas.0808480105. Epub 2008 Oct. 7.

### Example 23: Lack of DNA Replication or Replication Activity

[0952] This Example quantifies DNA replication in fusosomes. In an embodiment, fusosomes will replicate DNA at a low rate compared to cells.

[0953] Fusosomes are prepared by any one of the methods described in previous Examples. Fusosome and parental cell DNA replication activity is assessed by incorporation of a fluorescent-taggable nucleotide (ThermoFisher Scientific # C10632). Fusosomes and an equivalent number of cells are incubated with EdU at a final concentration of 10 μM for 2 hr, after preparation of an EdU stock solution with in dimethylsulfoxide. The samples are then fixed for 15 min using 3.7% PFA, washed with 1×PBS buffer, pH 7.4 and permeabilized for 15 min in 0.5% detergent solution in 1×PBS buffer, pH 7.4.

[0954] After permeabilization, fusosomes and cells in suspension in PBS buffer containing 0.5% detergent are washed with 1×PBS buffer, pH 7.4 and incubated for 30 min at 21° C. in reaction cocktail, 1×PBS buffer, CuSO4 (Component F), azide-fluor 488, 1× reaction buffer additive.

[0955] A negative control for fusosome and cell DNA replication activity is made with samples treated the same as above but with no azide-fluor 488 in the 1× reaction cocktail.

[0956] The cell and fusosome samples are then washed and resuspended in 1×PBS buffer and analyzed by flow cytometry. Flow cytometry is done with a FACS cytometer (Becton Dickinson, San Jose, Calif., USA) with 488 nm argon laser excitation, and a 530+/−30 nm emission spectrum is collected. FACS analysis software is used for acquisition and analysis. The light scatter channels are set on linear gains, and the fluorescence channels on a logarithmic scale, with a minimum of 10,000 cells analyzed in each condition. The relative DNA replication activity is calculated based on the median intensity of azide-fluor 488 in each sample. All events are captured in the forward and side scatter channels (alternatively, a gate can be applied to select only the fusosome population). The normalized fluorescence intensity value for the fusosomes is determined by subtracting from the median fluorescence intensity value of the fusosome the median fluorescence intensity value of the respective negative control sample. Then the normalized relative DNA replication activity for the fusosomes samples is normalized to the respective nucleated cell samples in order to generate quantitative measurements for DNA replication activity.

[0957] In an embodiment, fusosomes have less DNA replication activity than parental cells.

[0958] See, also, Salic, 2415-2420, doi: 10.1073/pnas.0712168105.

### Example 24: Quantification of Fusogens

[0959] This example describes quantification of the absolute number of fusogens per fusosome.

[0960] A fusosome composition is produced by any one of the methods described in the previous Examples, except the fusosome is engineered as described in a previous Example to express a fusogen (VSV-G) tagged with GFP. In addition, a negative control fusosome is engineered with no fusogen (VSV-G) or GFP present.

[0961] The fusosomes with the GFP-tagged fusogen and the negative control(s) are then assayed for the absolute number of fusogens as follows. Commercially acquired recombinant GFP is serially diluted to generate a calibration curve of protein concentration. The GFP fluorescence of the calibration curve and a sample of fusosomes of known quantity is then measured in a fluorimeter using a GFP light cube (469/35 excitation filter and a 525/39 emission filter) to calculate the average molar concentration of GFP molecules in the fusosome preparation. The molar concentration is then converted to the number of GFP molecules and divided by the number of fusosomes per sample to achieve an average number of GFP-tagged fusogen molecules per fusosome and thus provides a relative estimate of the number of fusogens per fusosome.

[0962] In an embodiment, GFP fluorescence will be higher in the fusosomes with GFP tag as compared to the negative controls, where no fusogen or GFP is present. In an embodiment, GFP fluorescence is relative to the number of fusogen molecules present.

[0963] Alternatively, individual fusosomes are isolated using a single cell prep system (Fluidigm) per manufacturer's instructions, and qRT-PCR is performed using a commercially available probeset (Taqman) and master mix designed to quantify fusogen or GFP cDNA levels based upon the Cₜ value. A RNA standard of the same sequence as the cloned fragment of the fusogen gene or the GFP gene is generated by synthesis (Amsbio) and then added to single cell prep system qRT-PCR experimental reaction in serial dilutions to establish a standard curve of Cₜ vs concentration of fusogen or GFP RNA.

[0964] The Cₜ value from fusosomes is compared to the standard curve to determine the amount of fusogen or GFP RNA per fusosome.

[0965] In an embodiment, fusogen and GFP RNA will be higher in the fusosomes with engineered to express the fusogens as compared to the negative controls, where no fusogen or GFP is present.

[0966] Fusogens may further be quantified in the lipid bilayer by analyzing the lipid bilayer structure as previously described and quantifying fusogens in the lipid bilayer by LC-MS as described in other Examples herein.

### Example 25: Measuring the Average Size of Fusosomes

[0967] This Example describes measurement of the average size of fusosomes.

[0968] Fusosomes are prepared by any one of the methods described in previous Examples. The fusosomes measured to determine the average size using commercially available systems (iZON Science). The system is used with software according to manufacturer's instructions and a nanopore designed to analyze particles within the 40 nm to 10 μm size range. Fusosomes and parental cells are resuspended in phosphate-buffered saline (PBS) to a final concentration range of 0.01-0.1 μg protein/mL. Other instrument settings are adjusted as indicated in the following table:

TABLE 7
Fusosome measurement parameters and settings

| Measurement Parameter | Setting |
|---|---|
| Pressure | 6 |
| Nanopore type | NP300 |
| Calibration sample | CPC400_6P |
| Gold standard analysis | no |
| Capture assistant | none |

[0969] All fusosomes are analyzed within 2 hours of isolation. In an embodiment, the fusosomes will have a size within about 1%, 2%, 3%, 4%, 5%, 10%, 20%, 30%, 40%, 50%, 60%, 70%, 80%, 90%, or greater than the parental cells.

### Example 26: Measuring the Average Size Distribution of Fusosomes

[0970] This Example describes measurement of the size distribution of fusosomes.

[0971] Fusosomes are generated by any one of the methods described in previous Examples, and are tested to determine the average size of particles using a commercially available system, such as described in a previous Example. In an embodiment, size thresholds for 10%, 50%, and 90% of the fusosomes centered around the median are compared to parental cells to assess fusosome size distribution.

[0972] In an embodiment, the fusosomes will have less than about 90%, 80%, 70%, 60%, 50%, 40%, 30%, 20%, 10%, 5%, or less of the parental cell's variability in size distribution within 10%, 50%, or 90% of the sample.

### Example 27: Average Volume of Fusosomes

[0973] This example describes measurement of the average volume of fusosomes. Without wishing to be bound by theory, varying the size (e.g., volume) of fusosomes can make them versatile for distinct cargo loading, therapeutic design or application.

[0974] Fusosomes are prepared as described in previous Examples. The positive control is HEK293 cells or polystyrene beads with a known size. The negative control is HEK293 cells that are passed through a 36 gauge needle approximately 50 times.

[0975] Analysis with a transmission electron microscope, as described in a previous Example, is used to determine the size of the fusosomes. The diameter of the fusosome is measured and volume is then calculated.

[0976] In an embodiment, fusosomes will have an average size of approximately 50 nm or greater in diameter.

### Example 28: Average Density of Fusosomes

[0977] Fusosome density is measured via a continuous sucrose gradient centrifugation assay as described in Théry et al., Curr Protoc Cell Biol. 2006 April; Chapter 3:Unit 3.22. Fusosomes are obtained as described in previous Examples.

[0978] First, a sucrose gradient is prepared. A 2 M and a 0.25 sucrose solution are generated by mixing 4 ml HEPES/sucrose stock solution and 1 ml HEPES stock solution or 0.5 ml HEPES/sucrose stock solution and 4.5 ml HEPES stock solution, respectively. These two fractions are loaded into the gradient maker with all shutters closed, the 2 M sucrose solution in the proximal compartment with a magnetic stir bar, and the 0.25 M sucrose solution in the distal compartment. The gradient maker is placed on a magnetic stir plate, the shutter between proximal and distal compartments is opened and the magnetic stir plate is turned on. HEPES stock solution is made as follows: 2.4 g N-2-hydroxyethylpiperazine-N′-2-ethanesulfonic acid (HEPES; 20 mMfinal), 300 H2O, adjust pH to 7.4 with 10 N NaOH and finally adjust volume to 500 ml with H2O. HEPES/sucrose stock solution is made as follows: 2.4 g hydroxyethylpiperazine-N′-2-ethanesulfonic acid (HEPES; 20 mM final), 428 g protease-free sucrose (ICN; 2.5 M final), 150 ml H2O, adjust pH to 7.4 with 10 N NaOH and finally adjust volume to 500 ml with H2O.

[0979] The fusosomes are resuspended in 2 ml of HEPES/sucrose stock solution and are poured on the bottom of an SW 41 centrifuge tube. The outer tubing is placed in the SW 41 tube, just above the 2 ml of fusosomes. The outer shutter is opened, and a continuous 2 M (bottom) to 0.25 M (top) sucrose gradient is slowly poured on top of the fusosomes. The SW 41 tube is lowered as the gradient is poured, so that the tubing is always slightly above the top of the liquid.

[0980] All tubes with gradients are balanced with each other, or with other tubes having the same weight of sucrose solutions. The gradients are centrifuged overnight (>14 hr) at 210,000×g, 4° C., in the SW 41 swinging-bucket rotor with the brake set on low.

[0981] With a micropipettor, eleven 1-ml fractions, from top to bottom, are collected and placed in a 3-ml tube for the TLA-100.3 rotor. The samples are set aside and, in separate wells of a 96-well plate, 50 μl of each fraction is used to measure the refractive index. The plate is covered with adhesive foil to prevent evaporation and stored for no more than 1 hour at room temperature. A refractometer is used to measure the refractive index (hence the sucrose concentration, and the density) of 10 to 20 μl of each fraction from the material saved in the 96-well plate.

[0982] A table for converting the refractive index into g/ml is available in the ultracentrifugation catalog downloadable from the Beckman website.

[0983] Each fraction is then prepared for protein content analysis. Two milliliters of 20 mM HEPES, pH 7.4, is added to each 1-ml gradient fraction, and mixed by pipetting up and down two to three times. One side of each tube is marked with a permanent marker, and the tubes are placed marked side up in a TLA-100.3 rotor.

[0984] The 3 ml-tubes with diluted fractions are centrifuged for 1 hr at 110,000×g, 4.C. The TLA-100.3 rotor holds six tubes, so two centrifugations for each gradient is performed with the other tubes kept at 4° C. until they can be centrifuged.

[0985] The supernatant is aspirated from each of the 3-ml tubes, leaving a drop on top of the pellet. The pellet most probably is not visible, but its location can be inferred from the mark on the tube. The invisible pellet is resuspended and transferred to microcentrifuge tubes. Half of each resuspended fraction is used for protein contentment analysis by bicinchoninic acid assay, described in another Example. This provides a distribution across the various gradient fractions of the fusosome preparation. This distribution is used to determine the average density of the fusosomes. The second half volume fraction is stored at −80° C. and used for other purposes (e.g. functional analysis, or further purification by immunoisolation) once protein analysis has revealed the fusosome distribution across fractions.

[0986] In an embodiment, using this assay, the average density of the fusosomes will be 1.25 g/ml+/−0.05 standard deviation. In an embodiment, the average density of the fusosomes will be in the range of 1-1.1, 1.05-1.15, 1.1-1.2, 1.15-1.25, 1.2-1.3, or 1.25-1.35. In an embodiment, the average density of the fusosomes will be less than 1 or more than 1.35.

### Example 29: Measuring Nuclear Envelope Content

[0987] This Example describes a measurement of the nuclear envelope content in enucleated fusosomes. The nuclear envelope isolates DNA from the cytoplasm of the cell.

[0988] In an embodiment, a purified fusosome composition comprises a mammalian cell, such as HEK-293 Ts (293 [HEK-293] (ATCC® CRL-1573™), that has been enucleated as described herein. This Example describes the quantification of different nuclear membrane proteins as a proxy to measure the amount of intact nuclear membrane that remains after fusosome generation.

[0989] In this Example, 10×10⁶HEK-293 Ts and the equivalent amount of fusosomes prepared from 10×10⁶HEK-293 Ts are fixed for 15 min using 3.7% PFA, washed with 1×PBS buffer, pH 7.4 and permeabilized simultaneously, and then blocked for 15 min using 1×PBS buffer containing 1% Bovine Serum Albumin and 0.5% Triton® X-100, pH 7.4. After permeabilization, fusosomes and cells are incubated for 12 hours at 4° C. with different primary antibodies, e.g. (anti-RanGAP1 antibody [EPR3295] (Abcam-ab92360), anti-NUP98 antibody [EPR6678]-nuclear pore marker (Abcam-ab124980), anti-nuclear pore complex proteins antibody [Mab414]-(Abcam-ab24609), anti-importin 7 antibody (Abcam-ab213670), at manufacturer suggested concentrations diluted in 1×PBS buffer containing 1% bovine serum albumin and 0.5% Triton® X-100, pH 7.4. Fusosomes and cells are then washed with 1×PBS buffer, pH 7.4, and incubated for 2 hr at 21° C. with an appropriate fluorescent secondary antibody that detects the previous specified primary antibody at manufacturer suggested concentrations diluted in 1×PBS buffer containing 1% bovine serum albumin and 0.5% detergent, pH 7.4. Fusosomes and cells are then washed with 1×PBS buffer, re-suspended in 300 μL of 1×PBS buffer, pH 7.4 containing 1 μg/ml Hoechst 33342, filtered through a 20 μm FACS tube and analyzed by flow cytometry.

[0990] Negative controls are generated using the same staining procedure but with no primary antibody added. Flow cytometry is performed on a FACS cytometer (Becton Dickinson, San Jose, Calif., USA) with 488 nm argon laser excitation, and a 530+/−30 nm emission spectrum is collected. FACS acquisition software is used for acquisition and analysis. The light scatter channels are set on linear gains, and the fluorescence channels on a logarithmic scale, with a minimum of 10,000 cells analyzed in each condition. The relative intact nuclear membrane content is calculated based on the median intensity of fluorescence in each sample. All events are captured in the forward and side scatter channels.

[0991] The normalized fluorescence intensity value for the fusosomes is determined by subtracting from the median fluorescence intensity value of the fusosome the median fluorescence intensity value of the respective negative control sample. Then the normalized fluorescence for the fusosomes samples is normalized to the respective nucleated cell samples in order to generate quantitative measurements of intact nuclear membrane content.

[0992] In an embodiment, enucleated fusosomes will comprise less than 1%, 2%, 3%, 4%, 5%, 10%, 20%, 30%, 40%, 50%, 60%, 70%, 80%, or 90% fluorescence intensity or nuclear envelope content compared to the nucleated parental cells.

### Example 30: Measuring Chromatin Levels

[0993] This Example describes measurement of chromatin in enucleated fusosomes.

[0994] DNA can be condensed into chromatin to allow it to fit inside the nucleus. In an embodiment, a purified fusosome composition as produced by any one of the methods described herein will comprise low levels of chromatin.

[0995] Enucleated fusosomes prepared by any of the methods previously described and positive control cells (e.g., parental cells) are assayed for chromatin content using an ELISA with antibodies that are specific to histone protein H3 or histone protein H4. Histones are the chief protein component of chromatin, with H3 and H4 the predominant histone proteins.

[0996] Histones are extracted from the fusosome preparation and cell preparation using a commercial kit (e.g. Abcam Histone Extraction Kit (ab113476)) or other methods known in the art. These aliquots are stored at −80 C until use. A serial dilution of standard is prepared by diluting purified histone protein (either H3 or H4) from 1 to 50 ng/μl in a solution of the assay buffer. The assay buffer may be derived from a kit supplied by a manufacturer (e.g. Abcam Histone H4 Total Quantification Kit (ab156909) or Abcam Histone H3 total Quantification Kit (ab115091)). The assay buffer is added to each well of a 48- or 96-well plate, which is coated with an anti-histone H3 or anti-H4 antibody and sample or standard control is added to the well to bring the total volume of each well to 50 μl. The plate is then covered and incubated at 37 degrees for 90 to 120 minutes.

[0997] After incubation, any histone bound to the anti-histone antibody attached to the plate is prepared for detection. The supernatant is aspirated and the plate is washed with 150 μl of wash buffer. The capture buffer, which includes an anti-histone H3 or anti-H4 capture antibody, is then added to the plate in a volume of 50 μl and at a concentration of 1 μg/mL. The plate is then incubated at room temperature on an orbital shaker for 60 minutes.

[0998] Next, the plate is aspirated and washed 6 times using wash buffer. Signal reporter molecule activatable by the capture antibody is then added to each well. The plate is covered and incubated at room temperature for 30 minutes. The plate is then aspirated and washed 4 times using wash buffer. The reaction is stopped by adding stop solution. The absorbance of each well in the plate is read at 450 nm, and the concentration of histones in each sample is calculated according to the standard curve of absorbance at 450 nm vs. concentration of histone in standard samples.

[0999] In an embodiment, fusosome samples will comprise less than 1%, 2%, 3%, 4%, 5%, 10%, 20%, 30%, 40%, 50%, 60%, 70%, 80%, or 90% the histone concentration of the nucleated parental cells.

### Example 31: Measuring miRNA Content in Fusosomes

[1000] This example describes quantification of microRNAs (miRNAs) in fusosomes. In an embodiment, a fusosome comprises miRNAs.

[1001] MiRNAs are regulatory elements that, among other activities, control the rate by which messenger RNAs (mRNAs) are translated into proteins. In an embodiment, fusosomes carrying miRNA may be used to deliver the miRNA to target sites.

[1002] Fusosomes are prepared by any one of the methods described in previous Examples. RNA from fusosomes or parental cells is prepared as described previously. At least one miRNA gene is selected from the Sanger Center miRNA Registry at www.sanger.ac.uk/Software/Rfam/mirna/index.shtml. miRNA is prepared as described in Chen et al, Nucleic Acids Research, 33(20), 2005. All TaqMan miRNA assays are available through Thermo Fisher (A25576, Waltham, Mass.).

[1003] qPCR is carried out according to manufacturer's specifications on miRNA cDNA, and C_{T} values are generated and analyzed using a real-time PCR system as described herein.

[1004] In an embodiment, the miRNA content of fusosomes will be at least 1%, 2%, 3%, 4%, 5%, 10%, 20%, 30%, 40%, 50%, 60%, 70%, 80%, 90%, or greater than that of their parental cells.

### Example 32: Quantifying Expression of an Endogenous RNA or Synthetic RNA in Fusosomes

[1005] This example describes quantification of levels of endogenous RNA with altered expression, or a synthetic RNA that is expressed in a fusosome.

[1006] The fusosome or parental cell is engineered to alter the expression of an endogenous or synthetic RNA that mediates a cellular function to the fusosomes.

[1007] Transposase vectors (System Biosciences, Inc.) includes the open reading frame of the Puromycin resistance gene together with an open reading frame of a cloned fragment of a protein agent. The vectors are electroporated into 293 Ts using an electroporator (Amaxa) and a 293T cell line specific nuclear transfection kit (Lonza).

[1008] Following selection with puromycin for 3-5 days in DMEM containing 20% Fetal Bovine Serum and 1× Penicillin/Streptomycin, fusosomes are prepared from the stably expressing cell line by any one of the methods described in previous Examples.

[1009] Individual fusosomes are isolated and protein agent or RNA per fusosome is quantified as described in a previous Example.

[1010] In an embodiment, the fusosomes will have at least 1, 2, 3, 4, 5, 10, 20, 50, 100, 500, 10³, 5.0×10³, 10⁴, 5.0×10⁴, 10⁵, 5.0×10⁵, 10⁶, 5.0×10⁶, or more of the RNA per fusosome.

### Example 33: Measuring Proteomic Composition in Fusosomes

[1011] This Example describes quantification of the protein composition of fusosomes. In an embodiment, the protein composition of fusosomes will be similar to the cells that they are derived from.

[1012] Fusosomes are prepared by any one of the methods described in previous Examples. Fusosomes are resuspended in lysis buffer (7M Urea, 2M Thiourea, 4% (w/v) Chaps in 50 mM Tris pH 8.0) and incubated for 15 minutes at room temperature with occasional vortexing. Mixtures are then lysed by sonication for 5 minutes in an ice bath and spun down for 5 minutes at 13,000 RPM. Protein content is determined by a colorimetric assay (Pierce) and protein of each sample is transferred to a new tube and the volume is equalized with 50 mM Tris pH 8.

[1013] Proteins are reduced for 15 minutes at 65 Celsius with 10 mM DTT and alkylated with 15 mM iodoacetamide for 30 minutes at room temperature in the dark. Proteins are precipitated with gradual addition of 6 volumes of cold (−20 Celsius) acetone and incubated overnight at −80 Celsius. Protein pellets are washed 3 times with cold (−20 Celsius) methanol. Proteins are resuspended in 50 mM Tris pH 8.3.

[1014] Next, trypsin/lysC is added to the proteins for the first 4 h of digestion at 37 Celsius with agitation. Samples are diluted with 50 mM Tris pH 8 and 0.1% sodium deoxycholate is added with more trypsin/lysC for digestion overnight at 37 Celsius with agitation. Digestion is stopped and sodium deoxycholate is removed by the addition of 2% v/v formic acid. Samples are vortexed and cleared by centrifugation for 1 minute at 13,000 RPM. Peptides are purified by reversed phase solid phase extraction (SPE) and dried down. Samples are reconstituted in 20 μl of 3% DMSO, 0.2% formic acid in water and analyzed by LC-MS.

[1015] To have quantitative measurements, a protein standard is also run on the instrument. Standard peptides (Pierce, equimolar, LC-MS grade, #88342) are diluted to 4, 8, 20, 40 and 100 fmol/ul and are analyzed by LC-MS/MS. The average AUC (area under the curve) of the 5 best peptides per protein (3 MS/MS transition/peptide) is calculated for each concentration to generate a standard curve.

[1016] Acquisition is performed with a high resolution mass spectrometer (ABSciex, Foster City, Calif., USA) equipped with an electrospray interface with a 25 μm iD capillary and coupled with micro-ultrahigh performance liquid chromatography (μUHPLC) (Eksigent, Redwood City, Calif., USA). Analysis software is used to control the instrument and for data processing and acquisition. The source voltage is set to 5.2 kV and maintained at 225° C., curtain gas is set at 27 psi, gas one at 12 psi and gas two at 10 psi. Acquisition is performed in Information Dependent Acquisition (IDA) mode for the protein database and in SWATH acquisition mode for the samples. Separation is performed on a reversed phase column 0.3 μm i.d., 2.7 μm particles, 150 mm long (Advance Materials Technology, Wilmington, Del.) which is maintained at 60° C. Samples are injected by loop overfilling into a 5 μL loop. For the 120 minute (samples) LC gradient, the mobile phase includes the following: solvent A (0.2% v/v formic acid and 3% DMSO v/v in water) and solvent B (0.2% v/v formic acid and 3% DMSO in EtOH) at a flow rate of 3 μL/min.

[1017] For the absolute quantification of the proteins, a standard curve (5 points, R2>0.99) is generated using the sum of the AUC of the 5 best peptides (3 MS/MS ion per peptide) per protein. To generate a database for the analysis of the samples, the DIAUmpire algorithm is run on each of the 12 samples and combined with the output MGF files into one database. This database is used with software (ABSciex) to quantify the proteins in each of the samples, using 5 transition/peptide and 5 peptide/protein maximum. A peptide is considered as adequately measured if the score computed is superior to 1.5 or had a FDR<1%. The sum of the AUC of each of the adequately measured peptides is mapped on the standard curve, and is reported as fmol.

[1018] The resulting protein quantification data is then analyzed to determine protein levels and proportions of known classes of proteins as follows: enzymes are identified as proteins that are annotated with an Enzyme Commission (EC) number; ER associated proteins are identified as proteins that had a Gene Ontology (GO; http://www.geneontology.org) cellular compartment classification of ER and not mitochondria; exosome associated proteins are identified as proteins that have a Gene Ontology cellular compartment classification of exosomes and not mitochondria; and mitochondrial proteins are identified as proteins that are identified as mitochondrial in the MitoCarta database (Calvo et al., NAR 20151 doi:10.1093/nar/gkv1003). The molar ratios of each of these categories are determined as the sum of the molar quantities of all the proteins in each class divided by the sum of the molar quantities of all identified proteins in each sample.

[1019] Fusosome proteomic composition is compared to parental cell proteomic composition. In an embodiment, a similar proteomic compositions between fusosomes and parental cells will be observed when >50% of the identified proteins are present in the fusosome, and of those identified proteins the level is >25% of the corresponding protein level in the parental cell.

### Example 34: Measuring GAPDH in Fusosomes

[1020] This assay describes quantification of the level of glyceraldehyde 3-phosphate dehydrogenase (GAPDH) in the fusosomes, and the relative level of GAPDH in the fusosomes compared to the parental cells.

[1021] GAPDH is measured in the parental cells and the fusosomes using a standard commercially available ELISA for GAPDH (ab176642, Abcam) per the manufacturer's directions.

[1022] Total protein levels are similarly measured via bicinchoninic acid assay as previously described in the same volume of sample used to measure GAPDH. In embodiments, using this assay, the level of GAPDH per total protein in the fusosomes will be <100 ng GAPDH/μg total protein. Similarly, in embodiments, the decrease in GAPDH levels relative to total protein from the parental cells to the fusosomes will be greater than a 10% decrease.

[1023] In an embodiment, GAPDH content in the preparation in ng GAPDH/μg total protein will be less than 500, less than 250, less than 100, less than 50, less than 20, less than 10, less than 5, or less than 1.

[1024] In an embodiment, the decrease in GAPDH per total protein in ng/μg from the parent cell to the preparation will be more than 1%, more than 2.5%, more than 5%, more than 10%, more than 15%, more than 20%, more than 30%, more than 40%, more than 50%, more than 60%, more than 70%, more than 80%, or more than 90%.

### Example 35: Measuring Calnexin in Fusosomes

[1025] This assay describes quantification of the level of calnexin (CNX) in the fusosomes, and the relative level of CNX in the fusosomes compared to the parental cells.

[1026] Calnexin is measured in the starting cells and the preparation using a standard commercially available ELISA for calnexin (MBS721668, MyBioSource) per the manufacturer's directions.

[1027] Total protein levels are similarly measured via bicinchoninic acid assay as previously described in the same volume of sample used to measure calnexin. In embodiments, using this assay, the level of calnexin per total protein in the fusosomes will be <100 ng calnexin/μg total protein. Similarly, in embodiments, the increase in calnexin levels relative to total protein from the parental cell to the fusosomes will be greater than a 10% increase.

[1028] In an embodiment, calnexin content in the preparation in ng calnexin/μg total protein will be less than 500, 250, 100, 50, 20, 10, 5, or 1.

[1029] In an embodiment, the decrease in calnexin per total protein in ng/μg from the parent cell to the preparation will be more than 1%, 2.5%, 5%, 10%, 15%, 20%, 30%, 40%, 50%, 60%, 70%, 80%, or 90%.

### Example 36: Comparison of Soluble to Insoluble Protein Mass

[1030] This Example describes quantification of the soluble:insoluble ratio of protein mass in fusosomes. In an embodiment, the soluble:insoluble ratio of protein mass in fusosomes will be similar to nucleated cells.

[1031] Fusosomes are prepared by any one of the methods described in previous Examples. The fusosome preparation is tested to determine the soluble:insoluble protein ratio using a standard bicinchoninic acid assay (BCA) (e.g. using the commercially available Pierce™ BCA Protein Assay Kit, Thermo Fischer product#23225). Soluble protein samples are prepared by suspending the prepared fusosomes or parental cells at a concentration of 1×10\hat{ }7 cells or fusosomes/mL in PBS and centrifuging at 1600 g to pellet the fusosomes or cells. The supernatant is collected as the soluble protein fraction.

[1032] The fusosomes or cells in the pellet are lysed by vigorous pipetting and vortexing in PBS with 2% Triton-X-100. The lysed fraction represents the insoluble protein fraction.

[1033] A standard curve is generated using the supplied BSA, from 0 to 20 μg of BSA per well (in triplicate). The fusosome or cell preparation is diluted such that the quantity measured is within the range of the standards. The fusosome preparation is analyzed in triplicate and the mean value is used. The soluble protein concentration is divided by the insoluble protein concentration to yield the soluble:insoluble protein ratio.

[1034] In an embodiment, the fusosome soluble:insoluble protein ratio will be within 1%, 2%, 3%, 4%, 5%, 10%, 20%, 30%, 40%, 50%, 60%, 70%, 80%, 90%, or greater compared to the parental cells.

### Example 37: Measuring LPS in Fusosomes

[1035] This example describes quantification of levels of lipopolysaccharides (LPS) in fusosomes as compared to parental cells. In an embodiment, fusosomes will have lower levels of LPS compared to parental cells.

[1036] LPS are a component of bacterial membranes and potent inducer of innate immune responses.

[1037] The LPS measurements are based on mass spectrometry as described in the previous Examples.

[1038] In an embodiment, less than 5%, 1%, 0.5%, 0.01%, 0.005%, 0.0001%, 0.00001% or less of the lipid content of fusosomes will be LPS.

### Example 38: Ratio of Lipids to Proteins in Fusosomes

[1039] This Example describes quantification of the ratio of lipid mass to protein mass in fusosomes. In an embodiment, fusosomes will have a ratio of lipid mass to protein mass that is similar to nucleated cells.

[1040] Total lipid content is calculated as the sum of the molar content of all lipids identified in the lipidomics data set outlined in a previous Example. Total protein content of the fusosomes is measured via bicinchoninic acid assay as described herein.

[1041] Alternatively, the ratio of lipids to proteins can be described as a ratio of a particular lipid species to a specific protein. The particular lipid species is selected from the lipidomics data produced in a previous Example. The specific protein is selected from the proteomics data produced in a previous Example. Different combinations of selected lipid species and proteins are used to define specific lipid:protein ratios.

### Example 39: Ratio of Proteins to DNA in Fusosomes

[1042] This Example describes quantification of the ratio of protein mass to DNA mass in fusosomes. In an embodiment, fusosomes will have a ratio of protein mass to DNA mass that is much greater than cells.

[1043] Total protein content of the fusosomes and cells is measured as described in in a previous Example. The DNA mass of fusosomes and cells is measured as described in a previous Example. The ratio of proteins to total nucleic acids is then determined by dividing the total protein content by the total DNA content to yield a ratio within a given range for a typical fusosome preparation.

[1044] Alternatively, the ratio of proteins to nucleic acids is determined by defining nucleic acid levels as the level of a specific house-keeping gene, such as GAPDH, using semi-quantitative real-time PCR (RT-PCR).

[1045] The ratio of proteins to GAPDH nucleic acids is then determined by dividing the total protein content by the total GAPDH DNA content to define a specific range of protein:nucleic acid ratio for a typical fusosome preparation.

### Example 40: Measuring Fusion with a Target Cell

[1046] This example describes quantification of fusosome fusion with a target cell compared to a non-target cell.

[1047] In an embodiment, fusosome fusion with a target cell allows the cell-specific delivery of a cargo, carried within the lumen of the fusosome, to the cytosol of the recipient cell. Fusosomes produced by the herein described methods are assayed for fusion rate with a target cell as follows.

[1048] In this example, the fusosome comprises a HEK293T cell expressing Myomaker on its plasma membrane. In addition, the fusosome expresses mTagBFP2 fluorescent protein and Cre recombinase. The target cell is a myoblast cell, which expresses both Myomaker and Myomixer, and the non-target cell is a fibroblast cell, which expresses neither Myomaker nor Myomixer. A Myomaker-expressing fusosome is predicted to fuse with the target cell that expresses both Myomaker and Myomixer but not the non-target cell (Quinn et al., 2017, Nature Communications, 8, 15665. doi.org/10.1038/ncomms15665) (Millay et al., 2013, Nature, 499(7458), 301-305. doi.org/10.1038/nature12343). Both the target and non-target cell types are isolated from mice and stably-express “LoxP-stop-Loxp-tdTomato” cassette under a CMV promoter, which upon recombination by Cre turns on tdTomato expression, indicating fusion.

[1049] The target or non-target recipient cells are plated into a black, clear-bottom 96-well plate. Both target and non-target cells are plated for the different fusion groups. Next, 24 hours after plating the recipient cells, the fusosomes expressing Cre recombinase protein and Myomaker are applied to the target or non-target recipient cells in DMEM media. The dose of fusosomes is correlated to the number of recipient cells plated in the well. After applying the fusosomes, the cell plate is centrifuged at 400 g for 5 minutes to help initiate contact between the fusosomes and the recipient cells.

[1050] Starting at four hours after fusosome application, the cell wells are imaged to positively identify RFP-positive cells versus GFP-positive cells in the field or well.

[1051] In this example, cell plates are imaged using an automated microscope (www.biotek.com/products/imaging-microscopy-automated-cell-imagers/lionheart-fx-automated-live-cell-imager/). The total cell population in a given well is determined by first staining the cells with Hoechst 33342 in DMEM media for 10 minutes. Hoechst 33342 stains cell nuclei by intercalating into DNA and therefore is used to identify individual cells. After staining, the Hoechst media is replaced with regular DMEM media.

[1052] The Hoechst is imaged using the 405 nm LED and DAPI filter cube. GFP is imaged using the 465 nm LED and GFP filter cube, while RFP is imaged using 523 nm LED and RFP filter cube. Images of target and non-target cell wells are acquired by first establishing the LED intensity and integration times on a positive-control well; i.e., recipient cells treated with adenovirus coding for Cre recombinase instead of fusosomes.

[1053] Acquisition settings are set so that RFP and GFP intensities are at the maximum pixel intensity values but not saturated. The wells of interest are then imaged using the established settings. Wells are imaged every 4 hours to acquire time-course data for rates of fusion activity.

[1054] Analysis of GFP and RFP-positive wells is performed with software provided with the fluorescent microscope or other software (Rasband, W. S., ImageJ, U. S. National Institutes of Health, Bethesda, Md., USA, rsb.info.nih.gov/ij/, 1997-2007).

[1055] The images are pre-processed using a rolling ball background subtraction algorithm with a 60 μm width. The total cell mask is set on the Hoechst-positive cells. Cells with Hoechst intensity significantly above background intensities are thresholded and areas too small or large to be Hoechst-positive cells are excluded.

[1056] Within the total cell mask, GFP and RFP-positive cells are identified by again thresholding for cells significantly above background and extending the Hoechst (nuclei) masks for the entire cell area to include the entire GFP and RFP cellular fluorescence. The number of RFP-positive cells identified in control wells containing target or non-target recipient cells is used to subtract from the number of RFP-positive cells in the wells containing fusosome (to subtract for non-specific Loxp recombination). The number of RFP-positive cells (fused recipient cells) is then divided by the sum of the GFP-positive cells (recipient cells that have not fused) and RFP-positive cells at each time point to quantify the rate of fusosome fusion within the recipient cell population. The rate is normalized to the given dose of fusosome applied to the recipient cells. For rates of targeted fusion (fusosome fusion to targeted cells), the rate of fusion to the non-target cell is subtracted from the rate of fusion to the target cell in order to quantify rates of targeted fusion.

[1057] In an embodiment, the average rate of fusion for the fusosomes with the target cells will be in the range of 0.01-4.0 RFP/GFP cells per hour for target cell fusion or at least 1%, 2%, 3%, 4%, 5%, 10%, 20%, 30%, 40%, 50%, 60%, 70%, 80%, 90% or greater than non-target recipient cells with fusosomes. In an embodiment, groups with no fusosome applied will show a background rate of <0.01 RFP/GFP cells per hour.

### Example 41: In Vitro Fusion to Deliver a Membrane Protein

[1058] This example describes fusosome fusion with a cell in vitro. In an embodiment, fusosome fusion with a cell in vitro results in delivery of an active membrane protein to the recipient cell.

[1059] In this example, the fusosomes are generated from a HEK293T cell expressing the Sendai virus HVJ-E protein (Tanaka et al., 2015, Gene Therapy, 22(October 2014), 1-8. doi.org/10.1038/gt.2014.12). In an embodiment, the fusosomes are generated to express the membrane protein, GLUT4, which is found primarily in muscle and fat tissues and is responsible for the insulin-regulated transport of glucose into cells. Fusosomes with and without GLUT4 are prepared from HEK293T cells as described by any of the methods described in a previous Example.

[1060] Muscles cells, such as, C2C12 cells, are then treated with fusosomes expressing GLUT4, fusosomes that do not express GLUT4, PBS (negative control), or insulin (positive control). The activity of GLUT4 on C2C12 cells is measured by the uptake of the fluorescent 2-deoxyglucose analog, 2-[N-(7-nitrobenz-2-oxa-1,3-diaxol-4-yl)amino]-2-deoxyglucose (2-NBDG). The fluorescence of C2C12 cells is assessed via microscopy using methods described in previous Examples.

[1061] In an embodiment, C2C12 cells that are treated with fusosomes that express GLUT4 and insulin are expected to demonstrate increased fluorescence compared to C2C12 cells treated with PBS or fusosomes not expressing GLUT4.

[1062] See, also, Yang et al., Advanced Materials 29, 1605604, 2017.

### Example 42: Measuring Extravasation from Blood Vessels

[1063] This Example describes quantification of fusosome extravasation across an endothelial monolayer as tested with an in vitro microfluidic system (J.S Joen et al. 2013, journals.plos.org/plosone/article?id=10.1371/journal.pone.0056910).

[1064] Cells extravasate from the vasculature into surrounding tissue. Without wishing to be bound by theory, extravasation is one way for fusosomes to reach extravascular tissues.

[1065] The system includes three independently addressable media channels, separated by chambers into which an ECM-mimicking gel can be injected. In brief, the microfluidics system has molded PDMS (poly-dimethyl siloxane; Silgard 184; Dow Chemical, MI) through which access ports are bored and bonded to a cover glass to form microfluidic channels. Channel cross-sectional dimensions are 1 mm (width) by 120 μm (height). To enhance matrix adhesion, the PDMS channels are coated with a PDL (poly-D-lysine hydrobromide; 1 mg/ml; Sigma-Aldrich, St. Louis, Mo.) solution.

[1066] Next, collagen type I (BD Biosciences, San Jose, Calif., USA) solution (2.0 mg/ml) with phosphate-buffered saline (PBS; Gibco) and NaOH is injected into the gel regions of the device via four separate filling ports and incubated for 30 min to form a hydrogel. When the gel is polymerized, endothelial cell medium (acquired from suppliers such as Lonza or Sigma) is immediately pipetted into the channels to prevent dehydration of the gel. Upon aspirating the medium, diluted hydrogel (BD science) solution (3.0 mg/ml) is introduced into the cell channel and the excess hydrogel solution is washed away using cold medium.

[1067] Endothelial cells are introduced into the middle channel and allowed to settle to form an endothelium. Two days after endothelial cell seeding, fusosomes or macrophage cells (positive control) are introduced into the same channel where endothelial cells had formed a complete monolayer. The fusosomes are introduced so they adhere to and transmigrate across the monolayer into the gel region. Cultures are kept in a humidified incubator at 37° C. and 5% CO2. A GFP-expressing version of the fusosome is used to enable live-cell imaging via fluorescent microscopy. On the following day, cells are fixed and stained for nuclei using DAPI staining in the chamber, and multiple regions of interest are imaged using confocal microscope to determine how many fusosomes passed through the endothelial monolayer.

[1068] In an embodiment, DAPI staining will indicate that fusosomes and positive control cells are able to pass through the endothelial barrier after seeding.

### Example 43: Measuring Chemotactic Cell Mobility

[1069] This Example describes quantification of fusosome chemotaxis. Cells can move towards or away from a chemical gradient via chemotaxis. In an embodiment, chemotaxis will allow fusosomes to home to a site of injury, or track a pathogen. A purified fusosome composition as produced by any one of the methods described in previous Examples is assayed for its chemotactic abilities as follows.

[1070] A sufficient number of fusosomes or macrophage cells (positive control) are loaded in a micro-slide well according to the manufacturer's provided protocol in DMEM media (ibidi.com/img/cms/products/labware/channel_slides/S_8032X_Chemotaxis/IN_8032X_Chemot axis.pdf). Fusosomes are left at 37° C. and 5% CO2 for 1 h to attach. Following cell attachment, DMEM (negative control) or DMEM containing MCP1 chemoattractant is loaded into adjacent reservoirs of the central channel and the fusosomes are imaged continuously for 2 hours using a Zeiss inverted widefield microscope. Images are analyzed using ImageJ software (Rasband, W. S., ImageJ, U. S. National Institutes of Health, Bethesda, Md., USA, http://rsb.info.nih.gov/ij/, 1997-2007). Migration co-ordination data for each observed fusosome or cell is acquired with the manual tracking plugin (Fabrice Cordelières, Institut Curie, Orsay, France). Chemotaxis plots and migration velocities is determined with the Chemotaxis and Migration Tool (ibidi).

[1071] In an embodiment, the average accumulated distance and migration velocity of fusosomes will be within 1%, 2%, 3%, 4%, 5%, 10%, 20%, 30%, 40%, 50%, 60%, 70%, 80%, 90%, 100% or greater than the response of the positive control cells to chemokine. The response of cells to a chemokine is described, e.g., in Howard E. Gendelman et al., Journal of Neuroimmune Pharmacology, 4(1): 47-59, 2009.

### Example 44: Measuring Homing Potential

[1072] This Example describes homing of fusosomes to a site of injury. Cells can migrate from a distal site and/or accumulate at a specific site, e.g., home to a site. Typically, the site is a site of injury. In an embodiment, fusosomes will home to, e.g., migrate to or accumulate at, a site of injury.

[1073] Eight week old C57BL/6J mice (Jackson Laboratories) are dosed with notexin (NTX) (Accurate Chemical & Scientific Corp), a myotoxin, in sterile saline by intramuscular (IM) injection using a 30 G needle into the right tibialis anterior (TA) muscle at a concentration of 2 μg/mL. The skin over the tibialis anterior (TA) muscle is prepared by depilating the area using a chemical hair remover for 45 seconds, followed by 3 rinses with water. This concentration is chosen to ensure maximum degeneration of the myofibers, as well as minimal damage to their satellite cells, the motor axons and the blood vessels.

[1074] On day 1 after NTX injection, mice receive an IV injection of fusosomes or cells that express firefly luciferase. Fusosomes are produced from cells that stably express firefly luciferase by any one of the methods described in previous Examples. A bioluminescent imaging system (Perkin Elmer) is used to obtain whole animal images of bioluminescence at 0, 1, 3, 7, 21, and 28 post injection.

[1075] Five minutes before imaging, mice receive an intraperitoneal injection of bioluminescent substrate (Perkin Elmer) at a dose of 150 mg/kg in order to visualize luciferase. The imaging system is calibrated to compensate for all device settings. The bioluminescent signal is measured using Radiance Photons, with Total Flux used as a measured value. The region of interest (ROI) is generated by surrounding the signal of the ROI in order to give a value in photons/second. An ROI is assessed on both the TA muscle treated with NTX and on the contralateral TA muscle, and the ratio of photons/second between NTX-treated and NTX-untreated TA muscles is calculated as a measure of homing to the NTX-treated muscle.

[1076] In an embodiment, the ratio of photons/second between NTX-treated and NTX-untreated TA muscles in fusosomes and cells will be greater than 1 indicating site specific accumulation of luciferase-expressing fusosomes at the injury.

[1077] See, for example, Plant et al., Muscle Nerve 34(5)L 577-85, 2006.

### Example 45: Measuring Phagocytic Activity

[1078] This Example demonstrates phagocytic activity of fusosomes. In an embodiment, fusosomes have phagocytic activity, e.g., are capable of phagocytosis. Cells engage in phagocytosis, engulfing particles, enabling the sequestration and destruction of foreign invaders, like bacteria or dead cells.

[1079] A purified fusosome composition as produced by any one of the methods described in previous Examples comprising a fusosome from a mammalian macrophage having partial or complete nuclear inactivation was capable of phagocytosis assayed via pathogen bioparticles. This estimation was made by using a fluorescent phagocytosis assay according to the following protocol.

[1080] Macrophages (positive control) and fusosomes were plated immediately after harvest in separate confocal glass bottom dishes. The macrophages and fusosomes were incubated in DMEM+10% FBS+1% P/S for 1 h to attach. Fluorescein-labeled E. coli K12 and non-fluorescein-labeled Escherichia coli K-12 (negative control) were added to the macrophages/fusosomes as indicated in the manufacturer's protocol, and were incubated for 2 h, tools.thermofisher.com/content/sfs/manuals/mp06694.pdf. After 2 h, free fluorescent particles were quenched by adding Trypan blue. Intracellular fluorescence emitted by engulfed particles was imaged by confocal microscopy at 488 excitation. The number of phagocytotic positive fusosome were quantified using image J software.

[1081] The average number of phagocytotic fusosomes was at least 30% 2 h after bioparticle introduction, and was greater than 30% in the positive control macrophages.

### Example 46: Measuring Potential for Protein Secretion

[1082] This Example describes quantification of secretion by fusosomes. In an embodiment, fusosomes will be capable of secretion, e.g., protein secretion. Cells can dispose or discharge of material via secretion. In an embodiment, fusosomes will chemically interact and communicate in their environment via secretion.

[1083] The capacity of fusosomes to secrete a protein at a given rate is determined using the Gaussia luciferase flash assay from ThermoFisher Scientific (catalog #16158). Mouse embryonic fibroblast cells (positive control) or fusosomes as produced by any one of the methods described in previous Examples are incubated in growth media and samples of the media are collected every 15 minutes by first pelleting the fusosomes at 1600 g for 5 min and then collecting the supernatant. The collected samples are pipetted into a clear-bottom 96-well plate. A working solution of assay buffer is then prepared according to the manufacturer's instructions.

[1084] Briefly, colenterazine, a luciferin or light-emitting molecule, is mixed with flash assay buffer and the mixture is pipetted into each well of the 96 well plate containing samples. Negative control wells that lack cells or fusosomes include growth media or assay buffer to determine background Gaussia luciferase signal. In addition, a standard curve of purified Gaussia luciferase (Athena Enzyme Systems, catalog #0308) is prepared in order to convert the luminescence signal to molecules of Gaussia luciferase secretion per hour.

[1085] The plate is assayed for luminescence, using 500 msec integration. Background Gaussia luciferase signal is subtracted from all samples and then a linear best-fit curve is calculated for the Gaussia luciferase standard curve. If sample readings do not fit within the standard curve, they are diluted appropriately and re-assayed. Using this assay, the capacity for fusosomes to secrete Gaussia luciferase at a rate (molecules/hour) within a given range is determined.

[1086] In an embodiment, fusosomes will be capable of secreting proteins at a rate that is 1%, 2%, 3%, 4%, 5%, 10%, 20%, 30%, 40%, 50%, 60%, 70%, 80%, 90%, 100% or greater than the positive control cells.

### Example 47: Measuring Signal Transduction Potential

[1087] This Example describes quantification of signal transduction in fusosomes. In an embodiment, fusosomes are capable of signal transduction. Cells can send and receive molecular signals from the extracellular environment through signaling cascades, such as phosphorylation, in a process known as signal transduction. A purified fusosome composition as produced by any one of the methods described in previous Examples comprising a fusosome from a mammalian cell having partial or complete nuclear inactivation is capable of signal transduction induced by insulin. Signal transduction induced by insulin is assessed by measuring AKT phosphorylation levels, a key pathway in the insulin receptor signaling cascade, and glucose uptake in response to insulin.

[1088] To measure AKT phosphorylation, cells, e.g., Mouse Embryonic Fibroblasts (MEFs) (positive control), and fusosomes are plated in 48-well plates and left for 2 hours in a humidified incubator at 37° C. and 5% CO₂. Following cell adherence, insulin (e.g. at 10 nM), or a negative control solution without insulin, is add to the well containing cells or fusosomes for 30 min. After 30 minutes, protein lysate is made from the fusosomes or cells, and phospho-AKT levels are measured by western blotting in insulin stimulated and control unstimulated samples.

[1089] Glucose uptake in response to insulin or negative control solution is measured as it is explained in the glucose uptake section by using labeled glucose (2-NBDG). (S. Galic et al., Molecular Cell Biology 25(2): 819-829, 2005).

[1090] In an embodiment, fusosomes will enhance AKT phosphorylation and glucose uptake in response to insulin over the negative controls by at least 1%, 2%, 3%, 4%, 5%, 10%, 20%, 30%, 40%, 50%, 60%, 70%, 80%, 90%, 100% or greater.

### Example 48: Measuring Ability to Transport Glucose Across Cell Membrane

[1091] This Example describes quantification of the levels of a 2-NBDG (2-(N-(7-Nitrobenz-2-oxa-1,3-diazol-4-yl)Amino)-2-Deoxyglucose) a fluorescent glucose analog that can be used to monitor glucose uptake in live cells, and thus measure active transport across the lipid bilayer. In an embodiment, this assay can be used to measure the level of glucose uptake and active transport across the lipid bilayer of the fusosome.

[1092] A fusosome composition is produced by any one of the methods described in previous Examples. A sufficient number of fusosomes are then incubated in DMEM with no glucose, 20% Fetal Bovine Serum and 1× Penicillin/Streptomycin for 2 hr at 37° C. and 5% CO₂. After a 2 hr glucose starvation period, the medium is changed such that it includes DMEM with no glucose, 20% Fetal Bovine Serum, 1× Penicillin/Streptomycin and 20 uM 2-NBDG (ThermoFisher) and incubated for an additional 2 hr at 37° C. and 5% CO₂.

[1093] Negative control fusosomes are treated the same, except an equal amount of DMSO is added in place of 2-NBDG.

[1094] The fusosomes are then washed thrice with 1×PBS and re-suspended in an appropriate buffer, and transferred to a 96 well imaging plate. 2-NBDG fluorescence is then measured in a fluorimeter using a GFP light cube (469/35 excitation filter and a 525/39 emission filter) to quantify the amount of 2-NBDG that has been transported across the fusosome membrane and accumulated in the fusosome in the 1 hr loading period.

[1095] In an embodiment, 2-NBDG fluorescence will be higher in the fusosome with 2-NBDG treatment as compared to the negative (DMSO) control. Fluorescence measure with a 525/39 emission filter will correlate with to the number of 2-NBDG molecules present.

### Example 49: Measuring Esterase Activity in the Cytosol

[1096] This Example describes quantification of esterase activity, as a surrogate for metabolic activity, in fusosomes. The cytosolic esterase activity in fusosomes is determined by quantitative assessment of calcein-AM staining (Bratosin et al., Cytometry 66(1): 78-84, 2005).

[1097] The membrane-permeable dye, calcein-AM (Molecular Probes, Eugene Oreg. USA), is prepared as a stock solution of 10 mM in dimethylsulfoxide and as a working solution of 100 mM in PBS buffer, pH 7.4. Fusosomes as produced by any one of the methods described in previous Examples or positive control parental Mouse Embryonic Fibroblast cells are suspended in PBS buffer and incubated for 30 minutes with calcein-AM working solution (final concentration in calcein-AM: 5 mM) at 37° C. in the dark and then diluted in PBS buffer for immediate flow cytometric analysis of calcein fluorescence retention.

[1098] Fusosomes and control parental Mouse Embryonic Fibroblast cells are experimental permeabilized as a negative control for zero esterase activity with saponin as described in (Jacob et al., Cytometry 12(6): 550-558, 1991). Fusosomes and cells are incubated for 15 min in 1% saponin solution in PBS buffer, pH 7.4, containing 0.05% sodium azide. Due to the reversible nature of plasma membrane permeabilization, saponin is included in all buffers used for further staining and washing steps. After saponin permeabilization, fusosomes and cells are suspended in PBS buffer containing 0.1% saponin and 0.05% sodium azide and incubated (37C in the dark for 45 min) with calcein-AM to a final concentration of 5 mM, washed three times with the same PBS buffer containing 0.1% saponin and 0.05% sodium azide, and analyzed by flow cytometry. Flow cytometric analyses are performed on a FACS cytometer (Becton Dickinson, San Jose, Calif., USA) with 488 nm argon laser excitation and emission is collected at 530+/−30 nm. FACS software is used for acquisition and analysis. The light scatter channels are set on linear gains, and the fluorescence channels are set on a logarithmic scale, with a minimum of 10,000 cells analyzed in each condition. Relative esterase activities are calculated based on the intensity of calcein-AM in each sample. All events are captured in the forward and side scatter channels (alternatively, a gate can be applied to select only the fusosome population). The fluorescence intensity (FI) value for the fusosomes is determined by subtracting the FI value of the respective negative control saponin-treated sample. The normalized esterase activity for the fusosomes samples are normalized to the respective positive control cell samples in order to generate quantitative measurements for cytosolic esterase activities.

[1099] In an embodiment, a fusosome preparation will have within 1%, 2%, 3%, 4%, 5%, 10%, 20%, 30%, 40%, 50%, 60%, 70%, 80%, 90%, 100% or greater esterase activity compared to the positive control cell.

[1100] See also, Bratosin D, Mitrofan L, Palii C, Estaquier J, Montreuil J. Novel fluorescence assay using calcein-AM for the determination of human erythrocyte viability and aging. Cytometry A. 2005 July; 66(1):78-84; and Jacob BC, Favre M, Bensa J C. Membrane cell permeabilisation with saponin and multiparametric analysis by flow cytometry. Cytometry 1991; 12:550-558.

### Example 50: Measuring Acetylcholinesterase Activity in Fusosomes

[1101] Acetylcholinesterase activity is measured using a kit (MAK119, SIGMA) that follows a procedure described previously (Ellman, et al., Biochem. Pharmacol. 7, 88, 1961) and following the manufacturer's recommendations.

[1102] Briefly, fusosomes are suspended in 1.25 mM acetylthiocholine in PBS, pH 8, mixed with 0.1 mM 5,5-dithio-bis(2-nitrobenzoic acid) in PBS, pH 7. The incubation is performed at room temperature but the fusosomes and the substrate solution are pre-warmed at 37° C. for 10 min before starting the optical density readings.

[1103] Changes in absorption are monitored at 450 nm for 10 min with a plate reader spectrophotometer (ELX808, BIO-TEK instruments, Winooski, Vt., USA). Separately, a sample is used for determining the protein content of the fusosomes via bicinchoninic acid assay for normalization. Using this assay, the fusosomes are determined to have <100 AChE activity units/μg of protein.

[1104] In an embodiment, AChE activity units/μg of protein values will be less than 0.001, 0.01, 0.1, 1, 10, 100, or 1000.

### Example 51: Measuring Metabolic Activity Level

[1105] This Example describes quantification of the measurement of citrate synthase activity in fusosomes.

[1106] Citrate synthase is an enzyme within the tricarboxylic acid (TCA) cycle that catalyzes the reaction between oxaloacetate (OAA) and acetyl-CoA to generate citrate. Upon hydrolysis of acetyl-CoA, there is a release of CoA with a thiol group (CoA-SH). The thiol group reacts with a chemical reagent, 5,5-Dithiobis-(2-nitrobenzoic acid) (DTNB), to form 5-thio-2-nitrobenzoic acid (TNB), which is a yellow product that can be measured spectrophotometrically at 412 nm (Green 2008). Commercially-available kits, such as the Abcam Human Citrate Synthase Activity Assay Kit (Product #ab119692) provide all the necessary reagents to perform this measurement.

[1107] The assay is performed as per the manufacturer's recommendations. Fusosome sample lysates are prepared by collecting the fusosomes as produced by any one of the methods described in previous Examples and solubilizing them in Extraction Buffer (Abcam) for 20 minutes on ice. Supernatants are collected after centrifugation and protein content is assessed by bicinchoninic acid assay (BCA, ThermoFisher Scientific) and the preparation remains on ice until the following quantification protocol is initiated.

[1108] Briefly, fusosome lysate samples are diluted in 1× Incubation buffer (Abcam) in the provided microplate wells, with one set of wells receiving only 1× Incubation buffer. The plate is sealed and incubated for 4 hours at room temperature with shaking at 300 rpm. The buffer is then aspirated from the wells and 1× Wash buffer is added. This washing step is repeated once more. Then, 1× Activity solution is added to each well, and the plate is analyzed on a microplate reader by measuring absorbance at 412 nm every 20 seconds for 30 minutes, with shaking between readings.

[1109] Background values (wells with only 1× Incubation buffer) are subtracted from all wells, and the citrate synthase activity is expressed as the change in absorbance per minute per μg of fusosome lysate sample loaded (Δ mOD@412 nm/min/ug protein). Only the linear portion from 100-400 seconds of the kinetic measurement is used to calculate the activity.

[1110] In an embodiment, a fusosome preparation will have within 1%, 2%, 3%, 4%, 5%, 10%, 20%, 30%, 40%, 50%, 60%, 70%, 80%, 90%, 100% or greater synthase activity compared to the control cell.

[1111] See, for example, Green H J et al. Metabolic, enzymatic, and transporter response in human muscle during three consecutive days of exercise and recovery. Am J Physiol Regul Integr Comp Physiol 295: R1238-R1250, 2008.

### Example 52: Measuring Respiration Levels

[1112] This Example describes quantification of the measurement of respiration level in fusosomes. Respiration level in cells can be a measure of oxygen consumption, which powers metabolism. Fusosome respiration is measured for oxygen consumption rates by a Seahorse extracellular flux analyzer (Agilent) (Zhang 2012).

[1113] Fusosomes as produced by any one of the methods described in previous Examples or cells are seeded in a 96-well Seahorse microplate (Agilent). The microplate is centrifuged briefly to pellet the fusosomes and cells at the bottom of the wells. Oxygen consumption assays are initiated by removing growth medium, replacing with a low-buffered DMEM minimal medium containing 25 mM glucose and 2 mM glutamine (Agilent) and incubating the microplate at 37° C. for 60 minutes to allow for temperature and pH equilibrium.

[1114] The microplate is then assayed in an extracellular flux analyzer (Agilent) that measures changes in extracellular oxygen and pH in the media immediately surrounding adherent fusosomes and cells. After obtaining steady state oxygen consumption (basal respiration rate) and extracellular acidification rates, oligomycin (5 μM), which inhibits ATP synthase, and proton ionophore FCCP (carbonyl cyanide 4-(trifluoromethoxy) phenylhydrazone; 2 μM), which uncouples mitochondria, are added to each well in the microplate to obtain values for maximal oxygen consumption rates.

[1115] Finally, 5 μM antimycin A (inhibitor of mitochondria complex III) is added to confirm that respiration changes are due mainly to mitochondrial respiration. The minimum rate of oxygen consumption after antimycin A addition is subtracted from all oxygen consumption measurements to remove the non-mitochondrial respiration component. Cell samples that do not appropriately respond to oligomycin (at least a 25% decrease in oxygen consumption rate from basal) or FCCP (at least a 50% increase in oxygen consumption rate after oligomycin) are excluded from the analysis. Fusosomes respiration level is then measured as pmol O2/min/1e4 fusosomes.

[1116] This respiration level is then normalized to the respective cell respiration level. In an embodiment, fusosomes will have at least 1%, 2%, 3%, 4%, 5%, 10%, 20%, 30%, 40%, 50%, 60%, 70%, 80%, 90%, 100% or greater respiration level compared to the respective cell samples.

[1117] See, for example, Zhang J, Nuebel E, Wisidagama D R R, et al. Measuring energy metabolism in cultured cells, including human pluripotent stem cells and differentiated cells. Nature protocols. 2012; 7(6):10.1038/nprot.2012.048. doi:10.1038/nprot.2012.048.

### Example 53: Measuring Phosphatidylserine Levels of Fusosomes

[1118] This Example describes quantification of the level of annexin-V binding to the surface of fusosomes.

[1119] Dying cells can display phosphatidylserine on the cell surface which is a marker of apoptosis in the programmed cell death pathway. Annexin-V binds to phosphatidylserine, and thus, annexin-V binding is a proxy for viability in cells.

[1120] Fusosomes were produced as described herein. For detection of apoptosis signals, fusosomes or positive control cells were stained with 5% annexin V fluor 594 (A13203, Thermo Fisher, Waltham, Mass.). Each group (detailed in the table below) included an experimental arm that was treated with an apoptosis-inducer, menadione. Menadione was added at 100 μM menadione for 4 h. All samples were run on a flow cytometer (Thermo Fisher, Waltham, Mass.) and fluorescence intensity was measured with the YL1 laser at a wavelength of 561 nm and an emission filter of 585/16 nm. The presence of extracellular phophatidyl serine was quantified by comparing fluorescence intensity of annexin V in all groups.

[1121] The negative control unstained fusosomes were not positive for annexin V staining.

[1122] In an embodiment, fusosomes were capable of upregulating phosphatidylserine display on the cell surface in response to menadione, indicating that non-menadione stimulated fusosomes are not undergoing apoptosis. In an embodiment, positive control cells that were stimulated with menadione demonstrated higher-levels of annexin V staining than fusosomes not stimulated with menadione.

TABLE 8
Annexin V staining parameter

| | Mean Fluorescence Intensity |
|---|---|
| | of Annexin V Signal |
| Experimental Arm | (and standard deviation) |
| Unstained Fusosomes (negative | 941 (937) |
| control) | |
| Stained Fusosomes | 11257 (15826) |
| Stained Fusosomes + Menadione | 18733 (17146) |
| Stained Macrophages + Menadione | 14301 (18142) |
| (positive control) | |

### Example 54: Measuring Juxtacrine-Signaling Levels

[1123] This Example describes quantification of juxtacrine-signaling in fusosomes.

[1124] Cells can form cell-contact dependent signaling via juxtacrine signaling. In an embodiment, presence of juxtacrine signaling in fusosomes will demonstrate that fusosomes can stimulate, repress, and generally communicate with cells in their immediate vicinity.

[1125] Fusosomes produced by any one of the methods described in previous Examples from mammalian bone marrow stromal cells (BMSCs) having partial or complete nuclear inactivation trigger IL-6 secretion via juxtacrine signaling in macrophages. Primary macrophages and BMSCs are co-cultured. Bone marrow-derived macrophages are seeded first into 6-well plates, and incubated for 24 h, then primary mouse BMSC-derived fusosomes or BMSC cells (positive control parental cells) are placed on the macrophages in a DMEM medium with 10% FBS. The supernatant is collected at different time points (2, 4, 6, 24 hours) and analyzed for IL-6 secretion by ELISA assay. (Chang J. et al., 2015).

[1126] In an embodiment, the level of juxtacrine signaling induced by BMSC fusosomes is measured by an increase in macrophage-secreted IL-6 levels in the media. In an embodiment, the level of juxtacrine signaling will be at least 1%, 2%, 3%, 4%, 5%, 10%, 20%, 30%, 40%, 50%, 60%, 70%, 80%, 90%, 100% or greater than the levels induced by the positive control bone marrow stromal cells (BMSCs).

### Example 55: Measuring Paracrine-Signaling Levels

[1127] This Example describes quantification of paracrine signaling in fusosomes.

[1128] Cells can communicate with other cells in the local microenvironment via paracrine signaling. In an embodiment, fusosomes will be capable of paracrine signaling, e.g., to communicate with cells in their local environment. In an embodiment, the ability of fusosomes to trigger Ca²⁺ signaling in endothelial cells via paracrine-derived secretion with the following protocol will measure Ca²⁺ signaling via the calcium indicator, fluo-4 AM.

[1129] To prepare the experimental plate, murine pulmonary microvascular endothelial cells (MPMVECs) are plated on a 0.2% gelatin coated 25 mm glass bottom confocal dish (80% confluence). MPMVECs are incubated at room temperature for 30 min in ECM containing 2% BSA and 0.003% pluronic acid with 5 μM fluo-4 AM (Invitrogen) final concentration to allow loading of fluo-4 AM. After loading, MPMVECs are washed with experimental imaging solution (ECM containing 0.25% BSA) containing sulfinpyrazone to minimize dye loss. After loading fluo-4, 500 μl of pre-warmed experimental imaging solution is added to the plate, and the plate is imaged by a Zeiss confocal imaging system.

[1130] In a separate tube, freshly isolated murine macrophages are either treated with 1 μg/ml LPS in culture media (DMEM+10% FBS) or not treated with LPS (negative control). After stimulation, fusosomes are generated from macrophages by any one of the methods described in previous Examples.

[1131] Fusosomes or parental macrophages (positive control) are then labeled with cell tracker red, CMTPX (Invitrogen), in ECM containing 2% BSA and 0.003% pluronic acid. Fusosomes and macrophages are then washed and resuspended in experimental imaging solution. Labeled fusosomes and macrophages are added onto the fluo-4 AM loaded MPMVECs in the confocal plate.

[1132] Green and red fluorescence signal is recorded every 3 s for 10-20 min using Zeiss confocal imaging system with argon ion laser source with excitation at 488 and 561 nm for fluo-4 AM and cell tracker red fluorescence respectively. Fluo-4 fluorescence intensity changes are analyzed using imaging software (Mallilankaraman, K. et al., J Vis Exp. (58): 3511, 2011). The level of Fluo-4 intensity measured in negative control fusosome and cell groups is subtracted from LPS-stimulated fusosome and cell groups.

[1133] In an embodiment, fusosomes, e.g., activated fusosomes, will induce an increase in Fluo-4 fluorescence intensity that is at least 1%, 2%, 3%, 4%, 5%, 10%, 20%, 30%, 40%, 50%, 60%, 70%, 80%, 90%, 100% or greater than the positive control cell groups.

### Example 56: Measuring Ability to Polymerize Actin for Mobility

[1134] This Example describes quantification of cytoskeletal components, such as actin, in fusosomes. In an embodiment, fusosomes comprise cytoskeletal components such as actin, and are capable of actin polymerization.

[1135] Cells use actin, which is a cytoskeletal component, for motility and other cytoplasmic processes. The cytoskeleton is essential to creating motility driven forces and coordinating the process of movement

[1136] C2C12 cells were enucleated as described herein. Fusosomes obtained from the 12.5% and 15% Ficoll layers were pooled and labeled ‘Light’, while fusosomes from the 16-17% layers were pooled and labeled ‘Medium’. Fusosomes or cells (parental C2C12 cells, positive control) were resuspended in DMEM+Glutamax+10% Fetal Bovine Serum (FBS), plated in 24-well ultra-low attachment plates (#3473, Corning Inc, Corning, N.Y.) and incubated at 37° C.+5% CO₂. Samples were taken periodically (5.25 hr, 8.75 hr, 26.5 hr) and stained with 165 μM rhodamine phalloidin (negative control was not stained) and measured on a flow cytometer (#A24858, Thermo Fisher, Waltham, Mass.) with a FC laser YL1 (561 nm with 585/16 filter) to measure F-actin cytoskeleton content. The fluorescence intensity of rhodamine phalloidin in fusosomes was measured along with unstained fusosomes and stained parental C2C12 cells.

[1137] Fusosome fluorescence intensity was greater (FIG. 1) than the negative control at all timepoints, and fusosomes were capable of polymerizing actin at a similar rate to the parental C2C12 cells.

[1138] Additional cytoskeletal components, such as those listed in the table below, are measured via a commercially available ELISA systems (Cell Signaling Technology and MyBioSource), according to manufacturer's instructions.

TABLE 9
Cytoskeletal components

| Cytoskeletal | | |
|---|---|---|
| protein measured | Commercial Kit Type | Kit ID |
| Actin | Path Scan Total B-Actin Sandwich | Cell Signaling, |
| | ELISA Kit | 7880 |
| Arp2/3 | Human Actin Related protein 2/3 | MyBioSource, |
| | complex subunit(APRC2) | MBS7224740 |
| | ELISA KIT | |
| Formin | Formin Binding Protein 1 (FNBP1), | MyBioSource, |
| | ELISA Kit | MBS9308864 |
| Coronin | Human Coronin 1A ELISA Kit | MyBioSource, |
| | | MBS073640 |
| Dystrophin | Human dystrophin ELISA Kit | MyBioSource |
| | | MBS722223 |
| Keratin | Human Keratin 5 ELISA Kit | MyBioSource, |
| | | MBS081200 |
| Myosin | Human Myosin IG (MYO1G) ELISA | MyBioSource, |
| | Kit | MBS9312965 |
| Tubulin | Human Tubulin Beta 3 ELISA Kit | MyBioSource, |
| | | MBS097321 |

[1139] Then 100 uL of appropriately-diluted lysate is added to the appropriate well from the microwell strips. The microwells are sealed with tape and incubated for 2 hrs at 37 C. After incubation, the sealing tape is removed and the contents are discarded. Each microwell is washed four times with 200 uL of 1× Wash Buffer. After each individual wash, plates are struck onto an absorbent cloth so that the residual wash solution is removed from each well. However, wells are not completely dry at any time during the experiment.

[1140] Next, 100 ul of the reconstituted Detection Antibody (green) is added each individual well, except for negative control wells. Then wells are sealed and incubated for 1 hour at 37° C. The washing procedure is repeated after incubation is complete. 100 uL of reconstituted HRP-Linked secondary antibody (red) is added to each of the wells. The wells are sealed with tape and incubated for 30 minutes at 37° C. The sealing tape is then removed and the washing procedure is repeated. 100 uL of TMB Substrate is then added to each well. The wells are sealed with tape, then incubated for 10 minutes at 37° C. Once this final incubation is complete, 100 uL of STOP solution is added to each of the wells and the plate is shaken gently for several seconds.

[1141] Spectrophotometric analysis of the assay is conducted within 30 minutes of adding the STOP solution. The underside of the wells is wiped with lint-free tissue and then absorbance is read at 450 nm. In an embodiment, fusosome samples that have been stained with the detection antibody will absorb more light at 450 nm that negative control fusosome samples, and absorb less light than cell samples that have been stained with the detection antibody.

### Example 57: Measuring Average Membrane Potential

[1142] This Example describes quantification of the mitochondrial membrane potential of fusosomes. In an embodiment, fusosomes comprising a mitochondrial membrane will maintain mitochondrial membrane potential.

[1143] Mitochondrial metabolic activity can be measured by mitochondrial membrane potential. The membrane potential of the fusosome preparation is quantified using a commercially available dye, TMRE, for assessing mitochondrial membrane potential (TMRE: tetramethyl rhodamine, ethyl ester, perchlorate, Abcam, Cat# T669).

[1144] Fusosomes are generated by any one of the methods described in previous Examples. Fusosomes or parental cells are diluted in growth medium (phenol-red free DMEM with 10% fetal bovine serum) in 6 aliquots (untreated and FCCP-treated triplicates). One aliquot of the samples is incubated with FCCP, an uncoupler that eliminates mitochondrial membrane potential and prevents TMRE staining. For FCCP-treated samples, 2 μM FCCP is added to the samples and incubated for 5 minutes prior to analysis. Fusosomes and parental cells are then stained with 30 nM TMRE. For each sample, an unstained (no TMRE) sample is also prepared in parallel. Samples are incubated at 37° C. for 30 minutes. The samples are then analyzed on a flow cytometer with 488 nm argon laser, and excitation and emission is collected at 530+/−30 nm.

[1145] Membrane potential values (in millivolts, mV) are calculated based on the intensity of TMRE. All events are captured in the forward and side scatter channels (alternatively, a gate can be applied to exclude small debris). The fluorescence intensity (FI) value for both the untreated and FCCP-treated samples are normalized by subtracting the geometric mean of the fluorescence intensity of the unstained sample from the geometric mean of the untreated and FCCP-treated sample. The membrane potential state for each preparation is calculated using the normalized fluorescent intensity values with a modified Nernst equation (see below) that can be used to determine mitochondrial membrane potential of the fusosomes or cells based on TMRE fluorescence (as TMRE accumulates in mitochondria in a Nernstian fashion).

[1146] Fusosome or cell membrane potential is calculated with the following formula: (mV)=−61.5*log(Fluntreated-normalized/FIFCCP-treated-normalized). In an embodiment, using this assay on fusosome preparations from C2C12 mouse myoblast cells, the membrane potential state of the fusosome preparation will be within about 1%, 2%, 3%, 4%, 5%, 10%, 20%, 30%, 40%, 50%, 60%, 70%, 80%, 90%, 100% or greater than the parental cells. In an embodiment, the range of membrane potential is about −20 to −150 mV.

### Example 58: Measuring Persistence Half-Life in a Subject

[1147] This Example describes the measurement of fusosome half-life.

[1148] Fusosomes are derived from cells that express Gaussia luciferase produced by any one of the methods described in previous Examples, and pure, 1:2, 1:5, and 1:10 dilutions in buffered solution are made. A buffered solution lacking fusosomes is used as a negative control.

[1149] Each dose is administered to three eight week old male C57BL/6J mice (Jackson Laboratories) intravenously. Blood is collected from the retro-orbital vein at 1, 2, 3, 4, 5, 6, 12, 24, 48, and 72 hours after intravenous administration of the fusosomes. The animals are sacrificed at the end of the experiment by CO₂ inhalation.

[1150] Blood is centrifuged for 20 min at room temperature. The serum samples are immediately frozen at −80° C. until bioanalysis. Then, each blood sample is used to carry out a Gaussia luciferase activity assay after mixing the samples with Gaussia luciferase substrate (Nanolight, Pinetop, Ariz.). Briefly, colenterazine, a luciferin or light-emitting molecule, is mixed with flash assay buffer and the mixture is pipetted into wells containing blood samples in a 96 well plate. Negative control wells that lack blood contain assay buffer to determine background Gaussia luciferase signal.

[1151] In addition, a standard curve of positive-control purified Gaussia luciferase (Athena Enzyme Systems, catalog #0308) is prepared in order to convert the luminescence signal to molecules of Gaussia luciferase secretion per hour. The plate is assayed for luminescence, using 500 msec integration. Background Gaussia luciferase signal is subtracted from all samples and then a linear best-fit curve is calculated for the Gaussia luciferase standard curve. If sample readings do not fit within the standard curve, they are diluted appropriately and re-assayed. The luciferase signal from samples taken at 1, 2, 3, 4, 5, 6, 12, 24, 48, and 72 hours is interpolated to the standard curve. The elimination rate constant kₑ (h⁻¹) is calculated using the following equation of a one-compartment model: C(t)=C₀×^{-kext}, in which C(t) (ng/mL) is the concentration of fusosomes at time t (h) and Co the concentration of fusosomes at time=0 (ng/mL). The elimination half-life t_{1/2,e} (h) is calculated as ln(2)/kₑ.

[1152] In an embodiment, fusosomes will have a half-life of at least 1%, 2%, 3%, 4%, 5%, 10%, 20%, 30%, 40%, 50%, 60%, 70%, 80%, 90%, 100% or greater than the negative control cells.

### Example 59: Delivery of Fusosomes Via Non-Endocytic Pathway

[1153] This example describes quantification of fusosome delivery of Cre to a recipient cell via a non-endocytic pathway.

[1154] In an embodiment, fusosomes will deliver agents via a fusosome-mediated, non-endocytic pathway. Without wishing to be bound by theory, delivery of an agent, e.g., Cre, which is carried within the lumen of the fusosomes, directly to the cytosol of the recipient cells without any requirement for endocytosis-mediated uptake of the fusosomes, will occur through a fusosome-mediated, non-endocytic pathway delivery.

[1155] In this example, the fusosome comprises a HEK293T cell expressing the Sendai virus H and F protein on its plasma membrane (Tanaka et al., 2015, Gene Therapy, 22(October 2014), 1-8. https://doi.org/10.1038/gt.2014.123). In addition, the fusosome expresses mTagBFP2 fluorescent protein and Cre recombinase. The target cell is a RPMI8226 cell which stably-expresses “LoxP-GFP-stop-LoxP-RFP” cassette under a CMV promoter, which upon recombination by Cre switches from GFP to RFP expression, indicating fusion and Cre, as a marker, delivery.

[1156] Fusosomes produced by the herein described methods are assayed for delivery of Cre via a non-endocytic pathway as follows. The recipient cells are plated into a black, clear-bottom 96-well plate. Next, 24 hours after plating the recipient cells, the fusosomes expressing Cre recombinase protein and possessing the particular fusogen protein are applied to the recipient cells in DMEM media. To determine the level of Cre delivery via a non-endocytic pathway, a parallel group of recipient cells receiving fusosomes is treated with an inhibitor of endosomal acidification, chloroquine (30 μg/mL). The dose of fusosomes is correlated to the number of recipient cells plated in the well. After applying the fusosomes, the cell plate is centrifuged at 400 g for 5 minutes to help initiate contact between the fusosomes and the recipient cells. The cells are then incubated for 16 hours and agent delivery, Cre, is assessed via imaging.

[1157] The cells are imaged to positively identify RFP-positive cells versus GFP-positive cells in the field or well. In this example cell plates are imaged using an automated fluorescence microscope. The total cell population in a given well is determined by first staining the cells with Hoechst 33342 in DMEM media for 10 minutes. Hoechst 33342 stains cell nuclei by intercalating into DNA and therefore is used to identify individual cells. After staining, the Hoechst media is replaced with regular DMEM media.

[1158] The Hoechst is imaged using the 405 nm LED and DAPI filter cube. GFP is imaged using the 465 nm LED and GFP filter cube, while RFP is imaged using 523 nm LED and RFP filter cube. Images of the different cell groups are acquired by first establishing the LED intensity and integration times on a positive-control well; i.e., recipient cells treated with adenovirus coding for Cre recombinase instead of fusosomes.

[1159] Acquisition settings are set so that RFP and GFP intensities are at the maximum pixel intensity values but not saturated. The wells of interest are then imaged using the established settings.

[1160] Analysis of GFP and RFP-positive wells is performed with software provided with the fluorescence microscope or other software (Rasband, W. S., ImageJ, U. S. National Institutes of Health, Bethesda, Md., USA, 1997-2007). The images are pre-processed using a rolling ball background subtraction algorithm with a 60 μm width. The total cell mask is set on the Hoechst-positive cells. Cells with Hoechst intensity significantly above background intensities are used to set a threshold, and areas too small or large to be Hoechst-positive cells are excluded.

[1161] Within the total cell mask, GFP and RFP-positive cells are identified by again setting a threshold for cells significantly above background and extending the Hoechst (nuclei) masks for the entire cell area to include the entire GFP and RFP cellular fluorescence.

[1162] The number of RFP-positive cells identified in control wells containing recipient cells is used to subtract from the number of RFP-positive cells in the wells containing fusosomes (to subtract for non-specific Loxp recombination). The number of RFP-positive cells (recipient cells that received Cre) is then divided by the sum of GFP-positive cells (recipient cells that have not received Cre) and RFP-positive cells to quantify the fraction of fusosome Cre delivered to the recipient cell population. The level is normalized to the given dose of fusosomes applied to the recipient cells. To calculate the value of fusosome Cre delivered via a non-endocytic pathway, the level of fusosome Cre delivery in the presence of chloroquine (FusL+CQ) is determined as well as the level of fusosome Cre delivery in the absence of chloroquine (FusL−CQ). To determine the normalized value of fusosome Cre delivered via a non-endocytic pathway, the following equation is used: [(FusL−CQ)−(FusL+CQ)]/(FusL−CQ).

[1163] In an embodiment, the average level of fusosome Cre delivered via a non-endocytic pathway for a given fusosome will be in the range of 0.1-0.95, or at least 1%, 2%, 3%, 4%, 5%, 10%, 20%, 30%, 40%, 50%, 60%, 70%, 80%, 90% or greater than chloroquine treated recipient cells.

### Example 60: Delivery of Fusosomes Via Endocytic Pathway

[1164] This example describes fusosome delivery of Cre to a recipient cell via an endocytic pathway.

[1165] In an embodiment, fusosomes will deliver agents via a fusosome-mediated, endocytic pathway. Without wishing to be bound by theory, delivery of an agent, e.g., a cargo, carried in the lumen of the fusosomes, to the recipient cells with the route of uptake being endocytosis-dependent will occur through a fusosome-mediated, endocytic pathway delivery.

[1166] In this example the fusosome comprises microvesicles that were produced by extruding a HEK293T cell expressing a fusogen protein on its plasma membrane through a 2 μm filter (Lin et al., 2016, Biomedical Microdevices, 18(3). doi.org/10.1007/s10544-016-0066-y)(Riedel, Kondor-Koch, & Garoff, 1984, The EMBO Journal, 3(7), 1477-83. Retrieved from www.ncbi.nlm.nih.gov/pubmed/6086326). In addition, the fusosome expresses mTagBFP2 fluorescent protein and Cre recombinase. The target cell is a PC3 cell which stably-expresses “LoxP-GFP-stop-LoxP-RFP” cassette under a CMV promoter, which upon recombination by Cre switches from GFP to RFP expression, indicating fusion and Cre, as a marker, delivery.

[1167] Fusosomes produced by the herein described methods are assayed for delivery of Cre via an endocytic pathway as follows. The recipient cells are plated into a cell culture multi-well plate compatible with the imaging system to be used (in this example cells are plated in a black, clear-bottom 96-well plate). Next, 24 hours after plating the recipient cells, the fusosomes expressing Cre recombinase protein and possessing the particular fusogen protein are applied to the recipient cells in DMEM media. To determine the level of Cre delivery via an endocytic pathway, a parallel group of recipient cells receiving fusosomes is treated with an inhibitor of endosomal acidification, chloroquine (30 μg/mL). The dose of fusosomes is correlated to the number of recipient cells plated in the well. After applying the fusosomes, the cell plate is centrifuged at 400 g for 5 minutes to help initiate contact between the fusosomes and the recipient cells. The cells are then incubated for 16 hours and agent delivery, Cre, is assessed via imaging.

[1168] The cells are imaged to positively identify RFP-positive cells versus GFP-positive cells in the field or well. In this example cell plates are imaged using an automated fluorescent microscope. The total cell population in a given well is determined by first staining the cells with Hoechst 33342 in DMEM media for 10 minutes. Hoechst 33342 stains cell nuclei by intercalating into DNA and therefore is used to identify individual cells. After staining the Hoechst media is replaced with regular DMEM media.

[1169] The Hoechst is imaged using the 405 nm LED and DAPI filter cube. GFP is imaged using the 465 nm LED and GFP filter cube, while RFP is imaged using 523 nm LED and RFP filter cube. Images of the different cell groups are acquired by first establishing the LED intensity and integration times on a positive-control well; i.e., recipient cells treated with adenovirus coding for Cre recombinase instead of fusosomes.

[1170] Acquisition settings are set so that RFP and GFP intensities are at the maximum pixel intensity values but not saturated. The wells of interest are then imaged using the established settings.

[1171] Analysis of GFP and RFP-positive wells is performed with software provided with the fluorescent microscope or other software (Rasband, W. S., ImageJ, U. S. National Institutes of Health, Bethesda, Md., USA, 1997-2007). The images are pre-processed using a rolling ball background subtraction algorithm with a 60 μm width. The total cell mask is set on the Hoechst-positive cells. Cells with Hoechst intensity significantly above background intensities are thresholded and areas too small or large to be Hoechst-positive cells are excluded.

[1172] Within the total cell mask, GFP and RFP-positive cells are identified by again thresholding for cells significantly above background and extending the Hoechst (nuclei) masks for the entire cell area to include the entire GFP and RFP cellular fluorescence.

[1173] The number of RFP-positive cells identified in control wells containing recipient cells is used to subtract from the number of RFP-positive cells in the wells containing fusosomes (to subtract for non-specific Loxp recombination). The number of RFP-positive cells (recipient cells that received Cre) is then divided by the sum of the GFP-positive cells (recipient cells that have not received Cre) and RFP-positive cells to quantify the fraction of fusosome Cre delivered to the recipient cell population. The level is normalized to the given dose of fusosomes applied to the recipient cells. To calculate the value of fusosome Cre delivered via an endocytic pathway, the level of fusosome Cre delivery in the presence of chloroquine (FusL+CQ) is determined as well as the level of fusosome Cre delivery in the absence of chloroquine (FusL−CQ). To determine the normalized value of fusosome Cre delivered via an endocytic pathway, the following equation is used: (FusL+CQ)/(FusL−CQ).

[1174] In an embodiment, the average level of fusosome Cre delivered via an endocytic pathway for a given fusosome will be in the range of 0.01-0.6, or at least 1%, 2%, 3%, 4%, 5%, 10%, 20%, 30%, 40%, 50%, 60%, 70%, 80%, 90% or greater than chloroquine treated recipient cells.

### Example 61: Delivery of Fusosomes Via a Dynamin Mediated Pathway, a Macropinocytosis Pathway, or an Actin Mediated Pathway

[1175] This example describes fusosome delivery of Cre to a recipient cell via a dynamin mediated pathway. A fusosome comprising a microvesicle may be produced as described in the preceding example. Fusosomes are assayed for delivery of Cre via a dynamin-mediated pathway according to the preceding example, except that a group of recipient cells receiving fusosomes is treated with an inhibitor of dynamin, Dynasore (120 μM). To calculate the value of fusosome Cre delivered via a dynamin-mediated pathway, the level of fusosome Cre delivery in the presence of Dynasore (FusL+DS) is determined as well as the level of fusosome Cre delivery in the absence of Dynasore (FusL−DS). The normalized value of fusosome Cre delivered may be calculated as described in the preceding example.

[1176] This example also describes delivery of Cre to a recipient cell via macropinocytosis. A fusosome comprising a microvesicle may be produced as described in the preceding example. Fusosomes are assayed for delivery of Cre via macropinocytosis according to the preceding example, except that a group of recipient cells receiving fusosomes is treated with an inhibitor of macropinocytosis, 5-(N-ethyl-N-isopropyl)amiloride (EIPA) (25 μM). To calculate the value of fusosome Cre delivered via macropinocytosis, the level of fusosome Cre delivery in the presence of EIPA (FusL+EPIA) is determined as well as the level of fusosome Cre delivery in the absence of EPIA (FusL−EIPA). The normalized value of fusosome Cre delivered may be calculated as described in the preceding example.

[1177] This example also describes fusosome delivery of Cre to a recipient cell via an actin mediated pathway. A fusosome comprising a microvesicle may be produced as described in the preceding example. Fusosomes are assayed for delivery of Cre via macropinocytosis according to the preceding example, except that a group of recipient cells receiving fusosomes is treated with an inhibitor of actin polymerization, Latrunculin B (6 μM). To calculate the value of fusosome Cre delivered via an actin-mediated pathway, the level of fusosome Cre delivery in the presence of Latrunculin B (FusL+LatB) is determined as well as the level of fusosome Cre delivery in the absence of Latrunculin B (FusL−LatB). The normalized value of fusosome Cre delivered may be calculated as described in the preceding example.

### Example 62: In Vivo Delivery of Protein

[1178] This example describes the delivery of therapeutic agents to the eye by fusosomes.

[1179] Fusosomes are derived from hematopoietic stem and progenitor cells using any of the methods described in previous Examples and are loaded with a protein that is deficient in a mouse knock-out.

[1180] Fusosomes are injected subretinally into the right eye of a mouse that is deficient for the protein and vehicle control is injected into the left eye of the mice. A subset of the mice is euthanized when they reach 2 months of age.

[1181] Histology and H&E staining of the harvested retinal tissue is conducted to count the number of cells rescued in each retina of the mice (described in Sanges et al., The Journal of Clinical Investigation, 126(8): 3104-3116, 2016).

[1182] The level of the injected protein is measured in retinas harvested from mice euthanized at 2 months of age via a western blot with an antibody specific to the PDE6B protein.

[1183] In an embodiment, the left eyes of mice, which are administered fusosomes, will have an increased number of nuclei present in the outer nuclear level of the retina compared to the right eyes of mice, which are treated with vehicle. The increased protein is suggestive of complementation of the mutated PBE6B protein.

### Example 63: Assessment of Teratoma Formation after Administration of Fusosome

[1184] This Example describes the absence of teratoma formation with a fusosome. In an embodiment, a fusosome will not result in teratoma formation when administered to a subject.

[1185] The fusosomes are produced by any one of the methods described in a previous Example. Fusosomes, tumor cells (positive control) or vehicle (negative control) are subcutaneously injected in PBS into the left flank of mice (12-20 weeks old). Teratoma, e.g., tumor, growth is analyzed 2-3 times a week by determination of tumor volume by caliper measurements for eight weeks after fusosome, tumor cell, or vehicle injection.

[1186] In an embodiment, mice administered fusosomes or vehicle will not have a measurable tumor formation, e.g., teratoma, via caliper measurements. In an embodiment, positive control animals treated with tumor cells will demonstrate an appreciable tumor, e.g., teratoma, size as measured by calipers over the eight weeks of observation.

### Example 64: Measuring Total RNA in a Fusosome and Source Cell

[1187] This Example describes a method to quantify the amount of RNA in a fusosome relative to a source cell. In an embodiment, a fusosome will have similar RNA levels to the source cell. In this assay, RNA levels are determined by measuring total RNA.

[1188] Fusosomes are prepared by any one of the methods described in previous Examples. Preparations of the same mass as measured by protein of fusosomes and source cells are used to isolate total RNA (e.g., using a kit such as Qiagen RNeasy catalog #74104), followed by determination of RNA concentration using standard spectroscopic methods to assess light absorbance by RNA (e.g. with Thermo Scientific NanoDrop).

[1189] In an embodiment, the concentration of RNA in fusosomes will be 5%, 10%, 20%, 30%, 40%, 50%, 60%, 70%, 80%, 90%, 95% of that of source cells per mass of protein.

### Example 65: Isolating Fusogenic Microvesicles Freely Released from Cells

[1190] This example describes the isolation of fusogenic microvesicles freely released from cells. Fusogenic microvesicles were isolated as follows. 9.2×10⁶ HEK-293T (ATCC, Cat# CRL-3216) were reverse transfected using Xfect transfection reagent (Takara, Cat#631317) with 10 μg of the pcDNA3.1 expression plasmid containing the open reading frame for VSVg and 15 ug of the pcDNA3.1 expression plasmid containing the open reading frame for bacteriophage P1 Cre Recombinase with a SV40 Nuclear localization sequence in 7.5 mL of complete media (Dulbecco's Modified Eagle Medium (DMEM) supplemented with GlutaMAX (ThermoFisher), 10% fetal calf serum (ThermoFisher), and penicillin/streptomycin antibiotics (ThermoFisher)) in a 100 mm collagen coated dish (Corning). Twelve hours after seeding, an additional 7.5 mL of complete medium was carefully added. The cells were separated from culture media by centrifugation at 200×g for 10 minutes. Supernatants were collected and centrifuged sequentially twice at 500×g for 10 minutes, once at 2,000×g for 15 minutes, once at 10,000×g for 30 min, and once at 70,000×g for 60 minutes. Freely released fusosomes were pelleted during the final centrifugation step, resuspended in PBS and repelleted at 70,000×g. The final pellet was resuspended in PBS.

[1191] See also, Wubbolts R et al. Proteomic and Biochemical Analyses of Human B Cell-derived Exosomes: Potential Implications for their Function and Multivesicular Body Formation. J. Biol. Chem. 278:10963-10972 2003.

### Example 66: Measuring the Average Size Distribution of Fusosomes

[1192] This Example describes measurement of the size distribution of fusosomes.

[1193] Fusosomes were prepared as described herein by transient transfection of HEK293T with VSV-G, enucleation and subsequent fractionation with Ficoll. The fusosomes were measured to determine the size distribution using the method of Example 25, as shown in FIG. 3. It is contemplated that the fusosomes can have less than about 50%, 40%, 30%, 20%, 10%, 5%, or less of the parental cell's variability in size distribution within 90% of the sample. It is contemplated that the fusosomes can have 58% less of the parental cell's variability in size distribution within 90% of the sample.

### Example 67: Average Volume of Fusosomes

[1194] This example describes measurement of the average volume of fusosomes. Varying the size (e.g., volume) of fusosomes can make them versatile for distinct cargo loading, therapeutic design or application.

[1195] Fusosomes were prepared as described herein by transient transfection of HEK293T with VSV-G, enucleation and subsequent fractionation with Ficoll. The positive control was HEK293T cells.

[1196] Analysis with a combination of NTA and confocal microscopy as described in Example 25 was used to determine the size of the fusosomes. The diameter of the fusosomes were measured and the volume calculated, as shown in FIG. 4. It is contemplated that fusosomes can have an average size of greater than 50 nm in diameter. It is contemplated that fusosomes can have an average size of 129 nm in diameter.

### Example 68: Comparison of Soluble to Insoluble Protein Mass

[1197] This Example describes quantification of the soluble:insoluble ratio of protein mass in fusosomes. The soluble:insoluble ratio of protein mass in fusosomes can, in some instances, be similar to that of nucleated cells.

[1198] Fusosomes were prepared as described herein by transient transfection of HEK293T with VSV-G, enucleation and subsequent fractionation with Ficoll. The fusosome preparation was tested to determine the soluble:insoluble protein ratio using a standard bicinchoninic acid assay (BCA) (Pierce™ BCA Protein Assay Kit, Thermo Fischer product#23225). Soluble protein samples were prepared by suspending the prepared fusosomes or parental cells at a concentration of 1×10⁷ cells or ˜1 mg/mL total fusosomes in PBS and centrifuging at 1,500×g to pellet the cells or 16,000×g to pellet the fusosomes. The supernatant was collected as the soluble protein fraction.

[1199] The fusosomes or cells were then resuspended in PBS. This suspension represents the insoluble protein fraction.

[1200] A standard curve was generated using the supplied BSA, from 0 to 15 μg of BSA per well (in duplicate). The fusosome or cell preparation was diluted such that the quantity measured is within the range of the standards. The fusosome preparation was analyzed in duplicate and the mean value was used. The soluble protein concentration was divided by the insoluble protein concentration to yield the soluble:insoluble protein ratio (FIG. 5).

### Example 69: Measuring Fusion with a Target Cell

[1201] Fusosomes derived from HEK-293T cells expressing the engineered hemagglutinin glycoprotein of measles virus (MvH) and the fusion protein (F) on the cell surface and containing Cre recombinase protein were generated, as described herein. The MvH was engineered so that its natural receptor binding is ablated and target cell specificity is provided through a single-chain antibody (scFv) that recognizes the cell surface antigen, in this case the scFv is designed to target CD8, a co-receptor for the T cell receptor. A control fusosome was used which was derived from HEK-293T cells expressing the fusogen VSV-G on its surface and containing Cre recombinase protein. The target cell was a HEK-293T cell engineered to express a “Loxp-GFP-stop-Loxp-RFP” cassette under CMV promoter, as well as engineered to over-express the co-receptors CD8a and CD8b. The non-target cell was the same HEK-293T cell expressing “Loxp-GFP-stop-Loxp-RFP” cassette but without CD8a/b over-expression. The target or non-target recipient cells were plated 30,000 cells/well into a black, clear-bottom 96-well plate and cultured in DMEM media with 10% fetal bovine serum at 37° C. and 5% CO₂. Four to six hours after plating the recipient cells, the fusosomes expressing Cre recombinase protein and MvH+F were applied to the target or non-target recipient cells in DMEM media. Recipient cells were treated with 10 μg of fusosomes and incubated for 24 hours at 37° C. and 5% CO₂.

[1202] Cell plates were imaged using an automated microscope (www.biotek.com/products/imaging-microscopy-automated-cell-imagers/lionheart-fx-automated-live-cell-imager/). The total cell population in a given well was determined by staining the cells with Hoechst 33342 in DMEM media for 10 minutes. Hoechst 33342 stains cell nuclei by intercalating into DNA and therefore is used to identify individual cells. The Hoechst was imaged using the 405 nm LED and DAPI filter cube. GFP was imaged using the 465 nm LED and GFP filter cube, while RFP was imaged using 523 nm LED and RFP filter cube. Images of target and non-target cell wells were acquired by first establishing the LED intensity and integration times on a positive-control well; i.e., recipient cells treated with adenovirus coding for Cre recombinase instead of fusosomes.

[1203] Acquisition settings were set so that Hoescht, RFP, and GFP intensities are at the maximum pixel intensity values but not saturated. The wells of interest were then imaged using the established settings. Focus was set on each well by autofocusing on the Hoescht channel and then using the established focal plane for the GFP and RFP channels. Analysis of GFP and RFP-positive cells was performed with Gen5 software provided with automated fluorescent microscope (https://www.biotek.com/products/software-robotics-software/gen5-microplate-reader-and-imager-software/).

[1204] The images were pre-processed using a rolling ball background subtraction algorithm with a 60 μm width. Cells with GFP intensity significantly above background intensities were thresholded and areas too small or large to be GFP-positive cells were excluded. The same analysis steps were applied to the RFP channel. The number of RFP-positive cells (recipient cells receiving Cre) was then divided by the sum of the GFP-positive cells (recipient cells that did not show delivery) and RFP-positive cells to quantify the percent RFP conversion, which describes the amount of fusosome fusion within the target and non-target recipient cell population. For amounts of targeted fusion (fusosome fusion to targeted recipient cells), the percent RFP conversion value is normalized to the percentage of recipient cells that are target recipient cells (i.e., expressing CD8), which was assessed by staining with anti-CD8 antibody conjugated to phycoerythrin (PE) and analyzed by flow cytometry. Finally, the absolute amount of targeted fusion was determined by subtracting the amount of non-target cell fusion from the target cell fusion amount (any value<0 was considered to be 0).

[1205] With this assay, the fusosome derived from a HEK-293T cell expressing the engineered MvH(CD8)+F on its surface and containing Cre recombinase protein showed a percentage RFP conversion of 25.2+/−6.4% when the recipient cell was the target HEK-293T cell expressing the “Loxp-GFP-stop-Loxp-RFP” cassette, and 51.1% of these recipient cells were observed to be CD8-positive. From these results, the normalized percentage RFP conversion or amount of targeted fusion was determined to be 49.3+/−12.7% for targeted fusion. The same fusosome showed a percentage RFP conversion of 0.5+/−0.1% when the recipient was the non-target HEK-293T cell expressing “Loxp-GFP-stop-Loxp-RFP” but with no expression of CD8. Based on the above, the absolute amount of targeted fusion for the MvH(CD8)+F fusosome determined to be 48.8% and the absolute amount of targeted fusion for the control VSV-G fusosome was determined to be 0% (FIG. 6).

### Example 70: Measuring Ability to Transport Glucose Across Cell Membrane

[1206] Fusosomes from HEK-293T cells expressing the envelope glycoprotein G from vesicular stomatitis virus (VSV-G) on the cell surface and expressing Cre recombinase protein were generated according by the standard procedure of ultracentrifugation through a Ficoll gradient to obtain small particle fusosomes as described herein. To measure the ability of the fusosomes to transport glucose across the cell membrane, the levels of a 2-NBDG (2-(N-(7-Nitrobenz-2-oxa-1,3-diazol-4-yl)Amino)-2-Deoxyglucose) fluorescent glucose analog, that can be used to monitor glucose uptake in live cells, was quantified to assess active transport across the lipid bilayer. A commercially-available kit from Biovision Inc. (Cat #K682) was used for the assay according to manufacturer's instructions.

[1207] Briefly, the fusosome sample was measured for total protein content by bicinchoninic acid assay (BCA, ThermoFisher, Cat #23225) according to manufacturer's instructions. Next 40 ug of fusosome total protein was pelleted by centrifugation at 3000 g for 5 minutes in a table-top centrifuge, followed by resuspension in 400 uL of DMEM supplemented with 0.5% fetal bovine serum. This was done in duplicate for each sample, and one of the duplicates was treated with 4 uL of phloretin (provided with the kit), a natural phenol that inhibits glucose uptake, as a control for glucose uptake inhibition. The samples were then incubated for 1 hour at room temperature. After the incubation, the fusosome sample was pelleted and resuspended in 400 uL of glucose uptake mix prepared previously (see Table 10 below for formulation). Samples pre-treated with phloretin were resuspended in glucose uptake mix with phloretin; samples not pre-treated were resuspended in glucose uptake mix with 20 uL of PBS instead of phloretin. Also a parallel set of fusosome samples were resuspended in DMEM media with 0.5% FBS only as a negative control for flow cytometry analysis.

TABLE 10
Glucose uptake mix formulation

| Reagent | Volume (uL) |
|---|---|
| DMEM media with 0.5% FBS | 1880 |
| 2-NBDG reagent | 20 |
| Glucose Uptake Enhancer | 100 |
| Optional: Phloretin | 20 |

[1208] The samples were then incubated at 37° C. with 5% CO₂ for 30 minutes. After the incubation cells were pelleted, washed once with 1 mL of 1× Analysis Buffer (provided with kit), pelleted again, and resuspended in 400 uL of 1× Analysis Buffer.

[1209] The samples were then measured for 2-NBDG uptake by flow cytometry analysis using an Invitrogen Attune NxT acoustic focusing cytometer. 2-NBDG was excited with a 488 nm laser and emission captured at 513±26 nm. Forward and side scatter gating was initially used to capture fusosome-sized events and discard small debris. Events positive for 2-NBDG were determined by gating at the minimum level for which the 2-NBDG negative control sample showed <0.5% of events positive for 2-NBDG staining. The gated cells positive for 2-NBDG fluorescence were then assessed for the mean fluorescence intensity (F.I.) of 2-NBDG in order to calculate a value for glucose uptake for the fusosomes with and without phloretin treatment.

[1210] With this assay, the fusosome derived from a HEK-293T cell expressing the VSV-G and Cre showed a 2-NBDG mean F.I. of 631.0+/−1.4 without phloretin treatment and a mean F.I. of 565.5+/−4.9 with phloretin treatment (FIG. 7).

### Example 71: Measuring Esterase Activity in the Cytosol

[1211] Fusosomes from C2C12 cells were generated according to the standard procedure of ultracentrifugation through a Ficoll gradient to obtain small particle fusosomes as described herein. To measure the esterase activity in the cytosol of the fusosomes, samples were stained with Calcein AM (BD Pharmigen, Cat #564061), a fluorescein derivative and nonfluorescent vital dye that passively crosses the cell membrane of viable cells and is converted by cytosolic esterases into green fluorescent calcein, which is retained by cells with intact membranes and inactive multidrug resistance protein.

[1212] Briefly, the fusosome sample was measured for total protein content by bicinchoninic acid assay (BCA, ThermoFisher, Cat #23225) according to manufacturer's instructions. Next 20 ug of fusosome total protein was pelleted by centrifugation at 3000 g for 5 minutes in a table-top centrifuge, followed by resuspension in 400 uL of DMEM supplemented with 0.5% fetal bovine serum. The membrane-permeable dye, calcein-AM was prepared as a stock solution of 10 mM in dimethylsulfoxide and as a working solution of 1 mM in PBS buffer, pH 7.4. VSV-G fusosomes were stained with 1 μM solution of calcein-AM diluted in DMEM media. Samples were incubated at 37° C. in the dark for 30 minutes and then pelleted by centrifugation. After washing twice with PBS buffer, fusosomes were resuspended in PBS and analyzed by flow cytometry.

[1213] The samples were measured for calcein fluorescence retention using an Invitrogen Attune NxT acoustic focusing cytometer. Calcein AM was excited with a 488 nm laser and emission captured at 513±26 nm. Forward and side scatter gating was initially used to capture fusosome-sized events and discard small debris. Events positive for calcein were determined by gating at the minimum level for which the calcein negative control sample showed <0.5% of events positive for calcein staining. The gated cells positive for calcein fluorescence were then assessed for the mean fluorescence intensity (F.I.) of calcein in order to calculate a value for esterase activity in the cytosol of fusosomes.

[1214] With this assay the fusosome derived from a C2C12 cell showed an esterase activity (mean calcein F.I.) of 631.0+/−1.4 (FIG. 8).

### Example 72: Measuring Acetylcholinesterase Activity in Fusosomes

[1215] Fusosomes from HEK-293T cells expressing the placental cell-cell fusion protein syncytin-1 (Syn1) on the cell surface and expressing Cre recombinase protein were generated as described herein. Acetylcholinesterase activity was measured using the FluoroCet Quantitation Kit (System Biosciences, Cat #FCET96A-1) following the manufacturer's recommendations.

[1216] Briefly, fusosomes were pelleted via ultracentrifugation at 120,000 g for 90 minutes and resuspended carefully in phosphate-buffered saline (PBS). Next fusosomes were quantified for total protein content by bicinchoninic acid assay (BCA, ThermoFisher, Cat #23225) according to manufacturer's instructions. After BCA quantification of protein concentration, 1000 ng of total fusosome protein was diluted with PBS to a volume of 60 uL, followed by addition of 60 uL of Lysis Buffer to lyse the particles. After a 30 minute incubation on ice the samples were ready to run in the FluoroCet assay.

[1217] In duplicate wells of a 96-well plate, 50 uL of lysed fusosome sample was mixed with 50 uL of Working stock of Buffer A and 50 uL of Working stock of Buffer B. In parallel, a standard curve was prepared by pipetting 2 uL of the provided standard in 126 uL of 1× Reaction buffer. This standard solution was then serial diluted 5× to make a six-point standard curve consisting of 2.0E+08, 1.0E+08, 5.0E+07, 2.5E+07, 1.25E+07, and 6.25E+06 exosome equivalents of acetylcholinesterase activity. 50 uL of each standard was then mixed with 50 uL of Working stock of Buffer A and 50 uL of Working stock of Buffer B in duplicate wells of the 96-well plate. 50 uL of 1× Reaction buffer was used as a blank. The plate was mixed by tapping the sides followed by incubation in the dark for 20 minutes at room temperature. The plate was then measured immediately using a fluorescence plate reader set at Excitation: 530-570 nm and Emission: 590-600 nm. The plate was shaken for 30 sec before reading.

[1218] The relative fluorescence units (RFU) were then plotted against the known exosome equivalents of acetylcholinesterase activity after subtracting the RFU values from the blank wells. A linear regression line was then calculated and the equation used to determine the acetylcholinesterase activity (in exosome equivalents) for the fusosome samples from the measured RFU values. The measured acetylcholinesterase activity for Syn1 fusosomes are shown in Table 11:

TABLE 11
Acetylcholinesterase activity in fusosomes and control particles

| Sample | Acetylcholinesterase activity (exosome equivalents) |
|---|---|
| Syn1 fusosomes | 6.83E+05 +/− 2.21E+05 |

### Example 73: Measuring Metabolic Activity Level

[1219] Fusosomes from HEK-293T cells expressing the envelope glycoprotein G from vesicular stomatitis virus (VSV-G) on the cell surface and expressing Cre recombinase protein were generated as described herein. To determine the metabolic activity level of the fusosome preparation, citrate synthase activity was assessed using a commercially available kit from Sigma (Cat #CS0720) which provides all of the necessary reagents. Citrate synthase is an enzyme within the tricarboxylic acid (TCA) cycle that catalyzes the reaction between oxaloacetate (OAA) and acetyl-CoA to generate citrate. Upon hydrolysis of acetyl-CoA, there is a release of CoA with a thiol group (CoA-SH). The thiol group reacts with a chemical reagent, 5,5-Dithiobis-(2-nitrobenzoic acid) (DTNB), to form 5-thio-2-nitrobenzoic acid (TNB), which has a yellow product that can be measured spectrophotometrically at 412 nm.

[1220] The assay was performed as per the manufacturer's recommendations. Briefly, fusosome sample was measured for total protein content by bicinchoninic acid assay (BCA, ThermoFisher, Cat #23225) according to manufacturer's instructions. Next 400 ug of fusosome total protein was pelleted by centrifugation at 3000 g for 5 minutes in a table-top centrifuge. The fusosomes were washed once by pelleting again and resuspending in ice-cold PBS. Fusosomes were pelleted again and supernatant was removed. The pellet was lysed in 100 uL of CellLytic M buffer with 1× protease inhibitors. After mixing by pipetting, the lysed sample was incubated for 15 minutes at room temperature to complete lysis. The sample was then centrifuged at 12,000 g for 10 minutes and the supernatant was transferred to a new microcentrifuge tube and stored at −80° C. until the subsequent assay was performed.

[1221] To initiate the citrate synthase activity assay, all assay solutions were warmed to room temperature prior to using. The lysed fusosome sample was mixed with assay solutions according to Table 12 below:

TABLE 12
Reaction Scheme for Citrate Synthase
Activity Measurement in 96 Well Plate

| | | | | 10 mM OAA |
|---|---|---|---|---|
| | Assay | 30 mM Acetyl CoA | 10 mM DTNB | solution |
| Sample | buffer | solution | solution | (added last) |
| 4 uL | 182 uL | 2 uL | 2 uL | 10 uL |

[1222] The volumes in Table 12 represent volumes for a single well of a 96-well plate. Samples were measured in duplicates. All components of the reaction were mixed and pipetted into a single well of a 96-well plate. The absorbance at 412 nm was then analyzed on a microplate reader for 1.5 minutes to measure the baseline reaction. Next, 10 uL of the 10 mM OAA solution was added to each well to initiate the reaction. The plate was shaken for 10 seconds in the microplate reader before reading the absorbance at 412 nm for 1.5 minutes with a measurement every 10 seconds.

[1223] To calculate the citrate synthase activity, the absorbance at 412 nm was plotted against time for each reaction. The change in absorbance per minute was calculated for the linear range of the plot for before (endogenous activity) and after (total activity) OAA addition. The net citrate synthase activity was then calculated by subtracting the endogenous activity from the total activity for the sample. This value was then used to calculate the citrate synthase activity based on the equation and constant values provided by the manufacturer. The measured citrate synthase activity for the VSV-G fusosomes was 1.57E-02+/−1.86E-03 umol/ug fusosome/min.

### Example 74: Measuring Respiration Levels

[1224] Fusosomes from HEK-293T cells expressing the envelope glycoprotein G from vesicular stomatitis virus (VSV-G) on the cell surface were generated according by the standard procedure of ultracentrifugation through a Ficoll gradient to obtain small particle fusosomes as described herein. Respiration level in the fusosome preparation were determined by measuring mitochondrial oxygen consumption rates by a Seahorse extracellular flux analyzer (Agilent).

[1225] Briefly, the fusosome sample was measured for total protein content by bicinchoninic acid assay (BCA, ThermoFisher, Cat #23225) according to manufacturer's instructions. Next 20 μg of fusosome total protein was pelleted by centrifugation at 3000 g for 5 minutes in a table-top centrifuge, followed by resuspension (in quadruplicates) in 150 μL of XF Assay media (Agilent Cat #103575-100) supplemented with 25 mM glucose and 2 mM glutamine (pH 7.4). The resuspended samples were then added to one well of a 96-well Seahorse plate (Agilent).

[1226] Oxygen consumption assays were initiated by incubating the 96-well Seahorse plate with samples at 37° C. for 60 minutes to allow temperature and pH to reach equilibrium. The microplate was then assayed in the XF96 Extracellular Flux Analyzer (Agilent) to measure extracellular flux changes of oxygen and pH in the media immediately surrounding the fusosomes. After obtaining steady state oxygen consumption and extracellular acidification rates, oligomycin (504), which inhibits ATP synthase, and proton ionophore FCCP (carbonyl cyanide 4-(trifluoromethoxy) phenylhydrazone; 204), which uncouples mitochondria, were injected sequentially through reagent delivery chambers for each well in the microplate to obtain values for maximal oxygen consumption rates. Finally, 5 μM antimycin A (inhibitor of mitochondrial complex III) was injected to confirm that respiration changes were due mainly to mitochondrial respiration. The rates of antimycin A respiration were subtracted from the other three respiration rates in order to determine the basal, uncoupled (oligomycin-resistant), and maximal (FCCP-induced) mitochondrial respiration rates.

[1227] Using this assay it was determined that donor VSV-G fusosomes showed basal, uncoupled, and maximal oxygen consumption (respiration) rates according to Table 13 below.

TABLE 13
Respiration rates of VSV-G fusosomes

| | Mitochondrial oxygen consumption |
|---|---|
| | (respiration) rate |
| | (pmol/min/20 μg fusosome) |
| Respiration state | AVG ± SEM |
| Basal | 11.3 ± 3.0 |
| Uncoupled | 10.1 ± 2.3 |
| Maximal | 20.0 ± 1.9 |

### Example 75: Measuring Phosphatidylserine Levels of Fusosomes

[1228] Fusosomes from HEK-293T cells expressing the envelope glycoprotein G from vesicular stomatitis virus (VSV-G) on the cell surface and expressing Cre recombinase protein were generated according by the standard procedure of ultracentrifugation through a Ficoll gradient to obtain small particle fusosomes as described herein. To measure the phosphatidylserine levels of the fusosomes, annexin V staining was performed using a commercially available annexin V conjugated with Alexa Fluor 647 dye (Cat #A23204) according to the manufacturer's instructions. Annexin V is a cellular protein that can bind phosphatidylserine when it is exposed on the outer leaflet of the plasma membrane; thus, the readout of annexin V binding to a sample can provide an assessment of phosphatidylserine levels in the sample.

[1229] Briefly, the fusosome sample was measured for total protein content by bicinchoninic acid assay (BCA, ThermoFisher, Cat #23225) according to manufacturer's instructions. Next 40 μg of fusosome total protein was pelleted by centrifugation (in sample triplicates) at 3000 g for 5 minutes in a table-top centrifuge, followed by resuspension in 400 uL of DMEM supplemented with 2% fetal bovine serum. One sample was treated with 40 μM antimycin A. The samples were then incubated for 1 hour at 37 C. After the incubation samples were then pelleted by centrifugation again and resuspended in 100 μL annexin-binding buffer (ABB; 10 mM HEPES, 140 mM NaCl, 2.5 mM CaCl₂), pH 7.4). Next 5 μL of annexin V conjugated with Alexa Fluor 647 was added to each sample (except for the negative control with no annexin V staining). The samples were incubated for 15 minutes at room temperature followed by addition of 400 μL ABB.

[1230] The samples were then measured for annexin V staining by flow cytometry analysis using an Invitrogen Attune NxT acoustic focusing cytometer. Annexin V conjugated with Alexa Fluor 647 was excited with a 638 nm laser and emission captured at 670±14 nm. Forward and side scatter gating was initially used to capture fusosome-sized events and discard small debris. Events positive for Alexa Fluor 647 (annexin V) staining were determined by gating at the minimum level for which the unstained, annexin V-negative control sample showed <0.5% of events positive for Alexa Fluor 647 staining. The gated events positive for Alexa Fluor 647 staining were then assessed for the percentage of annexin V-positive events of the total parent population (fusosome-sized events in the forward/side scatter gate) and this value was used as the quantification of phosphatidylserine levels in the fusosome sample.

[1231] With this assay the fusosome derived from a HEK-293T cell expressing the VSV-G and Cre showed a % annexin V-positive fusosomes of 63.3±2.3% without antimycin A treatment and percentage of annexin V-positive fusosomes of 67.6±5.7% with antimycin A treatment.

### Example 76: Measuring Average Mitochondrial Membrane Potential

[1232] Fusosomes from HEK-293T cells expressing the envelope glycoprotein G from vesicular stomatitis virus (VSV-G) on the cell surface and expressing Cre recombinase protein were generated according by the standard procedure of ultracentrifugation through a Ficoll gradient to obtain small particle fusosomes as described herein. To measure the average mitochondrial membrane potential levels of the fusosomes, a commercially available dye that is mitochondrial membrane potential sensitive, tetramethyl rhodamine, ethyl ester, perchlorate (TMRE; Abcam, Cat# T669) was used for assessing mitochondrial membrane potential. To normalize TMRE fluorescence intensity (FI) to the amount of mitochondria in the sample, MitoTracker Green FM dye (MTG; ThermoFisher, Cat #M7514) was used to co-stain samples in order to normalize TMRE FI to the MTG FI and thus to the amount of mitochondria in the sample. In addition, carbonyl cyanide-p-trifluoromethoxyphenylhydrazone (FCCP; Sigma Cat #C2920) was used to treat a parallel set of samples in order to fully depolarize the mitochondrial membrane potential and thus allow quantification of mitochondrial membrane potential in millivolts based on the decrease in TMRE FI.

[1233] Briefly, the fusosome sample was measured for total protein content by bicinchoninic acid assay (BCA, ThermoFisher, Cat #23225) according to manufacturer's instructions. Next 40 μg of fusosome total protein was pelleted by centrifugation (in sample quadruplicates for untreated and FCCP-treated duplicates) at 3000 g for 5 minutes in a table-top centrifuge, followed by resuspension in 100 uL of DMEM supplemented with 2% fetal bovine serum and containing TMRE and MTG dyes at a final concentration of 30 nM and 200 nM, respectively. A parallel set of fusosome samples was left unstained as a negative control. The samples were incubated at for 45 minutes at 37° C. After incubation, samples were pelleted by centrifugation and resuspended in 400 μL of phenol red-free DMEM media containing 30 nm TMRE. One set of duplicates was treated with 20 μM FCCP for 5 minutes before assessment by flow cytometry.

[1234] The samples were then measured for annexin V staining by flow cytometry analysis using an Invitrogen Attune NxT acoustic focusing cytometer. MTG was excited with a 488 nm laser and emission captured at 530±30 nm. TMRE was excited with a 561 nm laser and emission captured at 585±16 nm. Forward and side scatter gating was initially used to capture fusosome-sized events and discard small debris. Events positive for MTG and TMRE staining were determined by gating at the minimum level for which the unstained control sample showed <0.5% of events positive for MTG or TMRE staining. The gated events positive for MTG and TMRE staining were then assessed for the mean FI of MTG and TMRE.

[1235] Membrane potential values (in millivolts, mV) are calculated based on the intensity of TMRE after normalizing TMRE FI values to MTG FI values. This TMRE/MTG ratio value allows for normalization TMRE intensity to the amount of mitochondria in the sample. The TMRE/MTG ratio value for both the untreated and FCCP-treated samples are calculated and used to determine the membrane potential in millivolts using a modified Nernst equation (see below) that can determine mitochondrial membrane potential based on TMRE fluorescence (as TMRE accumulates in mitochondria in a Nernstian fashion). Fusosome membrane potential is calculated with the following formula: (mV)=−61.5*log(FI(untreated)/FI(FCCP-treated)). Using this equation, the calculated mitochondrial membrane potential of the VSV-G fusosome sample was −29.6±1.5 millivolts.

### Example 77: Measuring Targeting Potential in a Subject (BiVs-Cre Gesicles)

[1236] This example assesses the ability of a fusosome to target a specific body site. Fusosomes were derived using methods as described herein and were loaded with cre-recombinase protein.

[1237] Two doses of fusosomes (1× and 3×) were delivered into Loxp Luciferase (Jackson Laboratory, 005125) mice were injected intravenously (I.V.) via tail vein. Mice were placed underneath a heat lamp (utilizing a 250 W(infrared) heat lamp bulb) for ˜5 minutes (or until mice begin to groom their whiskers excessively) to dilate the tail vein. Mice were placed on a restrainer and tail was wiped down with 70% ethanol to better visualize the vein.

[1238] Using a tuberculin syringe, 200 μL of fusosome 1× solution (8.5e8±1.4e8 particles/μL, mean(SEM)) or 3× solution (2.55e9±1.4e8 particles/μL, mean(SEM)) was injected IV. Upon completion of injection, the syringe was removed, and pressure was applied to the injection site.

[1239] After fusion, CRE protein translocated to the nucleus to carry out recombination, which resulted in the constitutive expression of luciferase. Three days post-treatment, the ventral region of subjects was prepared by depilating the area (Nair Hair Remover cream for 45 seconds, followed by cleaning the area with 70% ethanol). Subjects were then treated with D-luciferin (Perkin Elmer, 150 mg/kg) via intraperitoneal administration. This enabled the detection of luciferase expression via in vivo bioluminescent imaging. The animal was placed into an in vivo bioluminescent imaging chamber (Perkin Elmer) which houses a cone anesthetizer (isoflurane) to prevent animal motion. Photon collection was carried out between 3-15 minutes post-injection to observe the maximum bioluminescent signal due to D-luciferin pharmacokinetic clearance. Maximum radiance was recorded in photons/sec/cm2/radians. Total flux, which integrates the radiance over the area, was quantified using a region of interest (ROI) tool within the Living Image Software (Perkin Elmer) and reported in photons/sec.

[1240] Evidence of protein (Cre recombinase) delivery by fusosomes was detected by bioluminescent imaging in the recipient tissue of the animal, as shown in FIGS. 9A-9B. Signal was seen primarily in the spleen and liver, with the 3× group showing the highest signal.

[1241] Following whole body imaging, mice were cervically dislocated and liver, heart, lungs, kidney, small intestines, pancreas, and spleen were collected and imaged within 5 minutes of euthanasia. Evidence of protein (Cre recombinase) delivery to the liver and spleen by fusosomes was detected by bioluminescent imaging in the extracted recipient tissue of the animals. This can be seen in FIGS. 10A-10B. Signal was highest in spleen and the lowest in heart, with the 3× group showing the highest significant signal (p=0.0004 as compared to heart).

### Example 78: Delivery of Fusosomes Via a Pathway that is Independent of Lysosome Acidification

[1242] Often, entry of complex biological cargo into target cells is accomplished by endocytosis. Endocytosis requires the cargo to enter an endosome, which matures into an acidified lysosome. Disadvantageously, cargo that enters a cell through endocytosis may become trapped in an endosome or lysosome and be unable to reach the cytoplasm. The cargo may also be damaged by acidic conditions in the lysosome. Some viruses are capable of non-endocytic entry into target cells; however this process is incompletely understood. This example demonstrates that a viral fusogen can be isolated from the rest of the virus and confer non-endocytic entry on a fusosome that lacks other viral proteins.

[1243] Fusosomes from HEK-293T cells expressing the Nipah virus receptor-binding G protein and fusion F protein (NivG+F) on the cell surface and expressing Cre recombinase protein were generated according by the standard procedure of ultracentrifugation through a Ficoll gradient to obtain small particle fusosomes, as described herein. To demonstrate delivery of the fusosome to a recipient cell via a non-endocytic pathway, the NivG+F fusosomes were used to treat recipient HEK-293T cells engineered to express a “Loxp-GFP-stop-Loxp-RFP” cassette under CMV promoter. NivF protein is a pH-independent envelope glycoprotein that has been shown to not require environmental acidification for activation and subsequent fusion activity (Tamin, 2002).

[1244] The recipient cells were plated 30,000 cells/well into a black, clear-bottom 96-well plate. Four to six hours after plating the recipient cells, the NivG+F fusosomes expressing Cre recombinase protein were applied to the target or non-target recipient cells in DMEM media. The fusosome sample was first measured for total protein content by bicinchoninic acid assay (BCA, ThermoFisher, Cat #23225) according to manufacturer's instructions. Recipient cells were treated with 10 μg of fusosomes and incubated for 24 hrs at 37° C. and 5% CO2. To demonstrate that Cre delivery via NivG+F fusosomes was through a non-endocytic pathway, a parallel wells of recipient cells receiving NivG+F fusosome treatment were co-treated with an inhibitor of endosome/lysosome acidification, bafilomycin A1 (Baf; 100 nM; Sigma, Cat #B1793).

[1245] Cell plates were imaged using an automated microscope (www.biotek.com/products/imaging-microscopy-automated-cell-imagers/lionheart-fx-automated-live-cell-imager/). The total cell population in a given well was determined by staining the cells with Hoechst 33342 in DMEM media for 10 minutes. Hoechst 33342 stains cell nuclei by intercalating into DNA and was therefore used to identify individual cells. Hoechst staining was imaged using the 405 nm LED and DAPI filter cube. GFP was imaged using the 465 nm LED and GFP filter cube, while RFP was imaged using the 523 nm LED and RFP filter cube. Images of target and non-target cell wells were acquired by first establishing the LED intensity and integration times on a positive control well containing recipient cells treated with adenovirus coding for Cre recombinase instead of fusosomes.

[1246] Acquisition settings were set so that Hoescht, RFP, and GFP intensities were at the maximum pixel intensity values but not saturated. The wells of interest were then imaged using the established settings. Focus was set on each well by autofocusing on the Hoescht channel and then using the established focal plane for the GFP and RFP channels. Analysis of GFP and RFP-positive cells was performed with Gen5 software provided with automated fluorescent microscope (https://www.biotek.com/products/software-robotics-software/gen5-microplate-reader-and-imager-software/).

[1247] The images were pre-processed using a rolling ball background subtraction algorithm with a 60 μm width. Cells with GFP intensity significantly above background intensities were thresholded and areas too small or large to be GFP-positive cells were excluded. The same analysis steps were applied to the RFP channel. The number of RFP-positive cells (recipient cells receiving Cre) was then divided by the sum of the GFP-positive cells (recipient cells that did not show delivery) and RFP-positive cells to quantify the percentage RFP conversion, which indicates the amount of fusosome fusion with the recipient cells.

[1248] With this assay, the fusosome derived from a HEK-293T cell expressing NivG+F on its surface and containing Cre recombinase protein showed significant delivery via a lysosome-independent pathway, which is consistent with entry via a non-endocytic pathway, as evidenced by a significant delivery of Cre cargo by NivG+F fusosomes even when recipient cells were co-treated with Baf to inhibit endocytosis-mediated uptake (FIG. 11). In this case, the inhibition of cargo delivery by Baf co-treatment was 23.4%.

### Example 79: Measuring Ability to Polymerize Actin for Mobility

[1249] Fusosomes were generated by the standard procedure of harvesting and preparing fusosomes produced from HEK-293T cells expressing the envelope glycoprotein G from vesicular stomatitis virus (VSV-G) on the cell surface, as described herein. Control particles (non-fusogenic fusosomes) were produced from HEK-293T cells reverse transiently transfected with pcDNA3.1 empty vector. Fusosomes and parental cells were then assayed for their ability to polymerize actin (over time) using a rhodamine phalloidin-flow cytometry assay and Tubulin ELISA. Briefly, approximately 1×10⁶ fusosomes corresponding to 60 μL of a standard VSV-G fusosome preparation and 1×10⁵ parent cells used to generate the fusosomes were plated in 1 mL of complete media in a 96 well low-attachment multi-well plate in complete and incubated at 37° C. and 5% CO₂. Samples were taken periodically, at 3 hr, 5 hr and 24 hr post plating. Samples were centrifuged at 21,000×g for 10 mins, re-suspended in 200 uL 4% (v/v) PFA in phosphate buffered saline for 10 mins, washed with 1 mL of phosphate buffered saline, centrifuged at 21,000×g for 10 mins, washed again and stored at 4° C. until further use.

[1250] For rhoamine-phalloidin staining, samples were centrifuged at 21,000×g for 10 mins, and incubated in 100 uL of 0.1% (v/v) Triton X-100 in phosphate buffered saline for 20 mins. Following the 20-min incubation, an additional 100 uL of 0.1% (v/v) Triton X-100 in phosphate buffered saline containing 165 μM rhodamine-phalloidin was added to the sample and pipette mixed, negative control received and additional 100 uL of 100 uL of 0.1% (v/v) Triton X-100 in phosphate buffered saline only. Samples were incubated for 45 mins before being washed with 1 mL of phosphate buffered saline, centrifuged at 21,000×g for 10 mins, washed again and re-suspended in 300 uL of phosphate buffered saline and analyzed by flow cytometry (Attune, ThermoFisher) using a 561 nm laser for excitation, and 585+/−16 nm filter emission, as shown in the table below:

[1251] Flow Cytometer Settings

| Dye | Attune Laser/Filter | Laser Wavelength | Emission Filter (nm) |
|---|---|---|---|
| AF47 | YL1 | 585 | 585/16 |

[1252] Attune NxT software was used for acquisition and FlowJo used analysis. For data acquisition the FSC and SSC channels were set on linear axis to determine a population representative of the cells or fusosomes. This population was then gated and events only inside this gate were used to display events in the 585+/−16 nm emission channel on a logarithmic scale. A minimum of 10,000 events within the cells or fusosomes gate was collected for in each condition. For data analysis, the FSC and SSC channels were set on linear axis to determine a population representative of the cells or fusosomes. This population was then gated and events only inside this gate were used to display events in the 585+/−16 nm emission channel on a logarithmic scale. The negative control 585+/−16 nm emission was used to determine where to place the gate on the histogram such that it was less the gate include less than 1% positive. Using analysis criteria listed above parent cells demonstrated 19.9%, 24.8% and 82.5% rhodamine-phalloidin positive events, at the 3 hr, 5 hr and 24 hr time-points, respectively. The fusosomes were 44.6%, 41.9% and 34.9% rhodamine-phalloidin at the 3 hr, 5 hr and 24 hr time-points, respectively (FIG. 2). This example demonstrates that fusosomes do not increase in amount of actin over time, whereas the parent cells do.

### Example 80: Measuring GAPDH in Fusosomes

[1253] This example describes quantification of the level of glyceraldehyde 3-phosphate dehydrogenase (GAPDH) in the fusosomes, and the relative level of GAPDH in the fusosomes compared to the parental cells. Fusosomes were prepared as described in Examples 65 and 84.

[1254] GAPDH was measured in the parental cells and the fusosomes using a standard commercially available ELISA for GAPDH (ab176642, Abcam) per the manufacturer's directions. Total protein levels were similarly measured via bicinchoninic acid assay. Measured GAPDH and protein levels are shown in the table below:

| | [Protein] | [GAPDH] | GAPDH:Protein |
|---|---|---|---|
| | (mg/mL) | (ng/mL) | (μg/g) |
| Fusosomes | 0.82 | 37.2 | 45.3 |
| Cells | 0.45 | 50.4 | 112.0 |

GAPDH: Total protein ratios are also shown in FIG. 12.

### Example 81: Ratio of Lipids to Proteins in Fusosomes

[1255] This Example describes quantification of the ratio of lipid mass to protein mass in fusosomes. It is contemplated that fusosomes can have a ratio of lipid mass to protein mass that is similar to that of nucleated cells. Fusosomes and parental cells were prepared as described herein in Examples 65 and 84.

[1256] The lipid content was calculated using choline-containing phospholipids as a subset of total lipids using a commercially available phospholipid assay kit (MAK122 Sigma St. Louis, Mo.) according to manufacturer's instructions. Total protein content of the fusosomes was measured via bicinchoninic acid assay as described herein. Measured phospholipid levels, protein levels, and the ratio of phospholipids to protein are shown in FIG. 13 and the table below:

| | Phospholipids | Protein | Phospholipids:Protein |
|---|---|---|---|
| | (μM) | (g/L) | (μmol/g) |
| Fusosomes | 115.6 | 0.82 | 141.0 |
| Cells | 47.9 | 0.45 | 106.4 |

### Example 82: Ratio of Proteins to DNA in Fusosomes

[1257] This Example describes quantification of the ratio of protein mass to DNA mass in fusosomes. It is contemplated that fusosomes can have a ratio of protein mass to DNA mass that is much greater than that of cells. Fusosomes were prepared as described in Examples 65 and 84.

[1258] Total protein content of the fusosomes and cells was measured via bicinchoninic acid as described herein. The DNA mass of fusosomes and cells were measured by absorption at 280 nm after extraction of total DNA using a commercially available isolation kit (#69504 Qiagen Hilden, Germany) according to the manufacturer's instructions. The ratio of proteins to total nucleic acids was determined by dividing the total protein content by the total DNA content to yield a ratio within a given range for a typical fusosome preparation. Measured protein levels, DNA levels, and the ratio of protein to DNA are shown in FIG. 14 and the table below:

| | [Protein] | [DNA] | Protein:DNA |
|---|---|---|---|
| | (mg/mL) | (ng/μL) | (g/g) |
| Fusosomes | 0.82 | 29.5 | 27.8 |
| Cells | 0.45 | 15.9 | 28.3 |

### Example 83: Ratio of Lipids to DNA in Fusosomes

[1259] This Example describes quantification of the ratio of lipids to DNA in fusosomes compared to parental cells. In an embodiment, fusosomes will have a greater ratio of lipids to DNA compared to parental cells. Fusosomes were prepared as described previously in Examples 65 and 84.

[1260] This ratio is defined as the lipid content outlined in Example 38, and nucleic acid content is determined as described in Example 39. Measured lipid levels, DNA levels, and the ratio of lipid to DNA are shown in FIG. 15 and the table below:

| | [Lipids] | [DNA] | Lipids:DNA |
|---|---|---|---|
| | (μM) | (ng/μL) | (μmol/mg) |
| Fusosomes | 115.6 | 29.5 | 3.92 |
| Cells | 47.9 | 15.9 | 3.01 |

### Example 84: Measuring Lipid Composition in Fusosomes

[1261] This Example describes quantification of the lipid composition of fusosomes. It is contemplated that the lipid composition of fusosomes can be similar to the cells from which they are derived. Lipid composition affects important biophysical parameters of fusosomes and cells, such as size, electrostatic interactions, and colloidal behavior.

[1262] The lipid measurements were based on mass spectrometry. Fusosomes were prepared as described herein by transient transfection of VSV-G and GFP in 10 cm dishes, followed by filtration and ultracentrifugation of the conditioned media 48 h after transfection to obtain fusosomes. Transfected cells were harvested in parallel to the conditioned media and submitted for analysis. Exosomes were also harvested from cells that were not transfected with VSV-G or GFP.

[1263] Mass spectrometry-based lipid analysis was performed by Lipotype GmbH (Dresden, Germany) as described (Sampaio et al. 2011). Lipids were extracted using a two-step chloroform/methanol procedure (Ejsing et al. 2009). Samples were spiked with internal lipid standard mixture containing:cardiolipin 16:1/15:0/15:0/15:0 (CL), ceramide 18:1; 2/17:0 (Cer), diacylglycerol 17:0/17:0 (DAG), hexosylceramide 18:1; 2/12:0 (HexCer), lyso-phosphatidate 17:0 (LPA), lyso-phosphatidylcholine 12:0 (LPC), lyso-phosphatidylethanolamine 17:1 (LPE), lyso-phosphatidylglycerol 17:1 (LPG), lyso-phosphatidylinositol 17:1 (LPI), lyso-phosphatidylserine 17:1 (LPS), phosphatidate 17:0/17:0 (PA), phosphatidylcholine 17:0/17:0 (PC), phosphatidylethanolamine 17:0/17:0 (PE), phosphatidylglycerol 17:0/17:0 (PG), phosphatidylinositol 16:0/16:0 (PI), phosphatidylserine 17:0/17:0 (PS), cholesterol ester 20:0 (CE), sphingomyelin 18:1; 2/12:0; 0 (SM), triacylglycerol 17:0/17:0/17:0 (TAG) and cholesterol D6 (Chol).

[1264] After extraction, the organic phase was transferred to an infusion plate and dried in a speed vacuum concentrator. 1st step dry extract was re-suspended in 7.5 mM ammonium acetate in chloroform/methanol/propanol (1:2:4, V:V:V) and 2nd step dry extract in 33% ethanol solution of methylamine in chloroform/methanol (0.003:5:1; V:V:V). All liquid handling steps were performed using Hamilton Robotics STARlet robotic platform with the Anti Droplet Control feature for organic solvents pipetting.

[1265] Samples were analyzed by direct infusion on a QExactive mass spectrometer (Thermo Scientific) equipped with a TriVersa NanoMate ion source (Advion Biosciences). Samples were analyzed in both positive and negative ion modes with a resolution of Rm/z=200=280000 for MS and R_{m/z}=200=17500 for MSMS experiments, in a single acquisition. MSMS was triggered by an inclusion list encompassing corresponding MS mass ranges scanned in 1 Da increments (Surma et al. 2015). Both MS and MSMS data were combined to monitor CE, DAG and TAG ions as ammonium adducts; PC, PC O-, as acetate adducts; and CL, PA, PE, PE O-, PG, PI and PS as deprotonated anions. MS only was used to monitor LPA, LPE, LPE O-, LPI and LPS as deprotonated anions; Cer, HexCer, SM, LPC and LPC O- as acetate adducts and cholesterol as ammonium adduct of an acetylated derivative (Liebisch et al. 2006).

[1266] Data were analyzed with in-house developed lipid identification software based on LipidXplorer (Herzog et al. 2011; Herzog et al. 2012). Data post-processing and normalization were performed using an in-house developed data management system. Only lipid identifications with a signal-to-noise ratio>5, and a signal intensity 5-fold higher than in corresponding blank samples were considered for further data analysis.

[1267] Fusosome lipid composition was compared to lipid compositions of parental cells, with undetected lipid species assigned a value of zero. The lipid species identified in fusosomes and parental cells are shown in the table below:

| | | Shared Lipid | Shared Lipid | |
|---|---|---|---|---|
| | | Species | Species with | |
| | Total | (identified | 25% of | Fraction of |
| | Lipid | in both | parental | Shared Lipid |
| | Species | parental cells | expression | Species to |
| | Identified | and fusomes) | in fusosomes | Total Lipids |
| Fusosomes | 679 | 569 | 548 | 0.700 |
| Parental | 783 | | | |
| Cells | | | | |

[1268] It is contemplated that fusosomes and parental cells can have a similar lipid composition if 70% of the lipid species identified in any replicate sample of the parental cells are present in any replicate sample of the fusosomes, and of those identified lipids, the average level in the fusosome can be >25% of the corresponding average lipid species level in the parental cell.

### Example 85: Measuring Proteomic Composition in Fusosomes

[1269] This Example describes quantification of the protein composition of fusosomes. It is contemplated that the protein composition of fusosomes can be similar to the parental cells from which they are derived.

[1270] Fusosomes and parental cells were prepared as described herein by the method of Examples 65 and 84.

[1271] Each sample was resuspended in lysis buffer (6 M urea, 2 M thiourea, 4% CHAPS, 50 mM Tris pH 8.0), sonicated on an ice bath and ran through a small gauge syringe. Proteins were reduced with 10 mM DTT for 15 minutes at 65° C. and alkylated with 15 mM iodoacetamide (IAA) for 30 minutes in the dark at room temperature. Excess IAA was quenched with an additional 10 mM DTT. Proteins were then precipitated with the addition of 8 volumes of ice cold acetone+1 volume of ice cold methanol and placed at −80° C. overnight. The precipitated proteins were pelleted by centrifugation. Remaining lysis buffer was washed with 200 μl of ice cold methanol 3 times. Proteins were resuspended in 0.75 M urea+50 mM Tris pH 8.0+1 μg Trypsin/LysC and pre-digested for 4 hours at 37° C. with agitation. An additional 1 μg of trypsin/LysC was added to the proteins and the digestion was continued overnight. Peptides were purified by reversed phase SPE and analyzed by LC-MS.

[1272] A replicate sample for each condition was lysed and combined in one tube. This pool was then either subjected to the same preparation protocol as the samples and analyzed by LC-MS in information dependent acquisition or separated on a gel as described below.

[1273] A total of 100 μg of pooled proteins was placed in 2× Laemmli loading buffer and separated on a 12.5% SDS PAGE. Proteins were briefly stained with Coomassie blue and the protein lanes were separated into 12 fractions. Each fraction was then dehydrated with 50% acetonitrile and rehydrated with 10 mM DTT for the reduction. Gel pieces were placed at 65° C. for 15 minutes and alkylated for 30 minutes at room temperature with 15 mM IAA in the dark. Gels were further dehydrated with 50% acetonitrile and rehydrated in 50 mM Tris pH 8 with 1 μg of trypsin/LysC overnight at 37° C. Peptides were extracted from the gel by dehydration and sonication. Peptides were purified by reversed phase SPE and analyzed by LC-MS/MS (1×IDA per fraction).

[1274] Acquisition was performed with an ABSciex TripleTOF 5600 (ABSciex, Foster City, Calif., USA) equipped with an electrospray interface with a 25 μm iD capillary and coupled to an Eksigent μUHPLC (Eksigent, Redwood City, Calif., USA). Analyst TF 1.7 software was used to control the instrument and for data processing and acquisition. Acquisition was performed in Information Dependent Acquisition (IDA) mode for the 12 fractions from the gel or the unfractionated pool. The samples were analyzed in SWATH acquisition mode. For the IDA mode, the source voltage was set to 5.2 kV and maintained at 225° C., curtain gas was set at 27 psi, gas one at 12 psi and gas two at 10 psi. For the SWATH mode, the source voltage was set to 5.5 kV and maintained at 225° C., curtain gas was set at 25 psi, gas one at 16 psi and gas two at 15 psi. Separation was performed on a reversed phase HALO C18-ES column 0.3 mm i.d., 2.7 μm particles, 150 mm long (Advance Materials Technology, Wilmington, Del.) which was maintained at 60° C. Samples were injected by loop overfilling into a 5 μL loop. For the 60 minutes LC gradient, the mobile phase consisted of the following solvent A (0.2% v/v formic acid and 3% DMSO v/v in water) and solvent B (0.2% v/v formic acid and 3% DMSO in EtOH) at a flow rate of 3 μL/min.

[1275] To generate the ion library for the analysis of the samples, the ProteinPilot software was run on the wiff files that were generated by the IDA runs. This database was used in the Peakview software (ABSciex) to quantify the proteins in each of the samples, using 3 transition/peptide and 15 peptide/protein. To maximize the number of quantified proteins, the samples were quantified on a publicly available human SWATH database (Atlas) with the same parameters. A peptide was considered as adequately measured if the score computed by Peakview was superior to 1.5 and had an FDR<1%. The quantification from each of the database was combined into one final quantification using the protein name from both databases. A correction factor was computed for every sample by taking into account the total signal of every protein in that sample when compared to the average of the total signal for every sample.

[1276] The fusosome proteomic composition was compared to the parental cell proteomic composition. A similar proteomic composition between fusosomes and parental cells was observed when >33% of the identified proteins were present in the fusosome, and of those identified proteins, the level was >25% of the corresponding protein level in the parental cell, as shown in the table below.

| | | Shared proteins | Shared proteins | |
|---|---|---|---|---|
| | | (identified | with 25% | Fraction of |
| | Total | in both | of parental | shared |
| | Proteins | parental cells | expression | proteins to |
| | Identified | and fusomes) | in fusosomes | total proteins |
| Fusosomes | 1926 | 1487 | 957 | 0.333 |
| Cells | 2870 | | | |

### Example 86: Quantifying an Endogenous or Synthetic Protein Level Per Fusosome

[1277] This example describes quantification of an endogenous or synthetic protein cargo in fusosomes. Fusosomes can, in some instances, comprise an endogenous or synthetic protein cargo. The fusosome or parental cell described in this Example was engineered to alter the expression of an endogenous protein or express a synthetic cargo that mediates a therapeutic or novel cellular function.

[1278] Fusosomes and parental cells expressing GFP were prepared as described herein by the method of Examples 65 and 84. Quantification of GFP in fusosomes was accomplished using a commercially available ELISA kit (ab171581 Abcam Cambridge, United Kingdom) according to the manufacturer's instructions. Fusosome quantification was performed by Nanoparticle Tracking Analysis using a NanoSight NS300 (Malvern Instruments, Malvern, Worcestershire, United Kingdom). Results are shown in the table below.

| | Concentration (#/mL) |
|---|---|
| GFP Protein | 4.41 × 10¹³ |
| Fusosomes | 2.66 × 10¹¹ |
| GFP:Fusosome | 165.8 |

[1279] It is contemplated that the fusosomes can have at least 1, 2, 3, 4, 5, 10, 20, 50, 100, or more protein agent molecules per fusosome. In an embodiment, the fusosomes will have 166 protein agent molecules per fusosome.

### Example 87: Measuring Markers of Exosomal Proteins in Fusosomes

[1280] This assay describes quantification of the proportion of proteins that are known to be specific markers of exosomes.

[1281] Fusosomes were prepared as described herein by the method of Examples 65 and 84. Exosomes were prepared as described herein for fusosomes by the method of Examples 65 and 84 with the exception that the parental cells were not transfected with VSV-G or GFP. Protein quantification by mass spectrometry for fusosomes and exosomes was performed as described herein in Example 33.

[1282] The resulting protein quantification data was analyzed to determine protein levels and proportions of the known exosomal marker CD63. Average log intensities per group were calculated by adding 1 to intensity values from mass spectrometry, transforming by log 10, and computing the mean across replicates. The results are shown in FIG. 16.

### Example 88: Measuring Calnexin in Fusosomes

[1283] This assay describes quantification of the level of calnexin (CNX) in the fusosomes, and the relative level of CNX in the fusosomes compared to the parental cells.

[1284] Fusosomes and parental cells were prepared as described herein in Examples 65 and 84. Calnexin and total protein was measured using mass spectrometry conducted according to the method of Example 33. The calnexin signal intensity determined for parental cells and fusosomes is shown in FIG. 17.

[1285] In embodiments, using this assay, the average fractional content (calculated as described herein in Example 33) of CNX in the fusosomes will be <2.43×10⁴.

[1286] In an embodiment, the decrease in calnexin per total protein in ng/μg from the parent cell to the preparation will be more than 88%.

### Example 89: Ratio of Lipids to DNA in Fusosomes

[1287] This Example describes quantification of the ratio of lipids to DNA in fusosomes compared to parental cells. In an embodiment, fusosomes will have a greater ratio of lipids to DNA compared to parental cells. Fusosomes were prepared as described previously in Examples 65 and 84.

[1288] This ratio is defined as the lipid content outlined in Example 38, and nucleic acid content is determined as described in Example 39. As shown in FIG. 18 and in the table below, fusosomes were found to exhibit a greater lipid:DNA ratio than parental cells.

| | [Lipids] | [DNA] | Lipids:DNA |
|---|---|---|---|
| | (μM) | (ng/μL) | (μmol/mg) |
| Fusosomes | 115.6 | 29.5 | 3.92 |
| Cells | 47.9 | 15.9 | 3.01 |

### Example 90: Analyzing Surface Markers on Fusosomes

[1289] This assay describes identification of surface markers on the fusosomes.

[1290] Fusosomes were prepared as described herein in Examples 65 and 84. Phosphatidylserine was measured by mass spectrometry as described herein in Examples 65 and 84. The quantity of phosphatidylserine relative to total lipids in fusosomes was determined to be 121% greater than the quantity of phosphatidylserine relative to total lipid in parental cells, as shown in the table below.

| | Phosphatidylserine | Phosphatidylserine |
|---|---|---|
| | (molar %) | Percent change |
| Fusosomes | 14.6 | 121% |
| Parental Cells | 6.6 | |

### Example 91: Analysis of Viral Capsid Proteins in Fusosomes

[1291] In this example, the makeup of the sample preparation was analyzed and the proportion of proteins that are derived from viral capsid sources was assessed.

[1292] Fusosomes were prepared as described herein by the method of Examples 65 and 84. Protein quantification by mass spectrometry for fusosomes was performed as described herein in Example 33. The fractional content of the viral capsid proteins was calculated as described herein in Example 33, averaged over fusosome samples, and expressed as a percent.

[1293] Using this approach, the sample was found to contain 0.05% viral capsid protein, as shown in the table below. The only viral capsid protein detected was Complex of Rabbit Endogenous Lentivirus (RELIK) Capsid with Cyclophilin A (PDB 2XGYIB).

| | Raw MS Intensity | Viral:Total Protein (%) |
|---|---|---|
| Viral Capsid Proteins | 5.10 × 10⁵ | 0.05 |
| Total Proteins | 9.46 × 10⁸ | |

### Example 92: Quantification of Fusogen Protein Ratios in Fusosomes

[1294] This example describes quantification of the ratio of fusogen protein to total protein or other proteins of interest in fusosomes. Other proteins of interest may include, but are not limited to, EGFP, CD63, ARRDC1, GAPDH, Calnexin (CNX), and TSG101. Fusosomes were prepared as described herein by the method of Examples 65 and 84. Protein quantification by mass spectrometry for fusosomes was performed as described herein in Example 33. The quantification of all proteins was calculated as described herein in Example 33, averaged over fusosome samples, and expressed as a fraction.

[1295] As shown in the table below, the fusogen was found to have a ratio to EGFP of 156.9, a ratio to CD63 of 2912.0, a ratio to ARRDC1 of 664.9, a ratio to GAPDH of 69.0, a ratio to CNX of 558.4, and a ratio to TSG101 of 3064.1.

| Proteins | Raw MS Intensity | Fusogen:Protein(s) Ratio |
|---|---|---|
| VSV-G | 1.29 × 10⁸ | N/A |
| Total Proteins | 9.46 × 10⁸ | 0.136 |
| EGFP | 8.22 × 10⁵ | 156.9 |
| CD63 | 4.43 × 10⁴ | 2912.0 |
| ARRDC1 | 1.94 × 10⁵ | 664.9 |
| GAPDH | 1.87 × 10⁶ | 69.0 |
| CNX | 2.31 × 10⁵ | 558.4 |
| TSG101 | 4.21 × 10⁴ | 3064.1 |

### Example 93: Quantification of Endogenous and Synthetic Protein Ratios in Fusosomes

[1296] This example describes the quantification of an endogenous or synthetic protein cargo relative to total protein or other proteins of interest in fusosomes. Other proteins of interest may include, but are not limited to, VSV-G, CD63, ARRDC1, GAPDH, Calnexin (CNX), or TSG101. Fusosomes were prepared as described herein by the method of Examples 65 and 84. Protein quantification by mass spectrometry for fusosomes was performed as described herein in Example 33. The quantification of all proteins was calculated as described herein in Example 33, averaged over fusosome samples, and expressed as a fraction.

[1297] As shown in the table below, the synthetic protein cargo was found to have a ratio to VSV-G of 6.37×10⁻³, a ratio to CD63 of 18.6, a ratio to ARRDC1 of 4.24, a ratio to GAPDH of 0.44, a ratio to CNX of 3.56, and a ratio to TSG101 of 19.52.

| Proteins | Raw MS Intensity | Protein Cargo:Protein(s) Ratio |
|---|---|---|
| EGFP | 8.22 × 10⁵ | N/A |
| Total Proteins | 9.46 × 10⁸ | 8.69 × 10⁻⁴ |
| VSV-G | 1.29 × 10⁸ | 6.37 × 10⁻³ |
| CD63 | 4.43 × 10⁴ | 18.6 |
| ARRDC1 | 1.94 × 10⁵ | 4.24 |
| GAPDH | 1.87 × 10⁶ | 0.44 |
| CNX | 2.31 × 10⁵ | 3.56 |
| TSG101 | 4.21 × 10⁴ | 19.52 |

### Example 94: Enriched Lipid Composition in Fusosomes

[1298] This Example describes quantification of the lipid composition of fusosomes, parental cells, and exosomes. It is contemplated that the lipid composition of fusosomes can be enriched and/or depleted for specific lipids relative to the cells from which they are derived. Lipid composition affects important biophysical parameters of fusosomes and cells, such as size, electrostatic interactions, and colloidal behavior.

[1299] The lipid composition was measured as described in Examples 65 and 84. Fusosomes were prepared as described herein by transient transfection of VSV-G and GFP in 10 cm dishes, followed by filtration and ultracentrifugation of the conditioned media 48 hours after transfection to obtain fusosomes. Transfected cells were harvested in parallel to the conditioned media and submitted for analysis. Exosomes were prepared as described herein for fusosomes with the exception that the parental cells were not transfected with VSV-G or GFP.

[1300] The lipid composition for fusosomes, exosomes, and parental cells is shown in FIGS. 19A-19B. Compared to parental cells, fusosomes were enriched for cholesteryl ester, free cholesterol, ether-linked lyso-phosphatidylethanolamine, lyso-phosphatidylserine, phosphatidate, ether-linked phosphatidylethanolamine, phosphatidylserine, and sphingomyelin. Compared to parental cells, fusosomes are depleted for ceramide, cardiolipin, lyso-phosphatidylcholine, lyso-phosphatidylethanolamine, lyso-phosphatidylglycerol, lyso-phosphatidylinositol, ether-linked phosphatidylcholine, phosphatidylethanolamine, phosphatidylglycerol, phosphatidylinositol, and triacylglycerol. Compared to exosomes, fusosomes were enriched for cholesteryl ester, ceramide, diacylglycerol, lyso-phosphatidate, and phosphatidylethanolamine, triacylglycerol. Compared to exosomes, fusosomes are depleted for free cholesterol, hexosyl ceramide, lyso-phosphatidylcholine, ether-linked lyso-phosphatidylcholine, lyso-phosphatidylethanolamine, ether-linked lyso-phosphatidylethanolamine, and lyso-phosphatidylserine,

### Example 95: Measuring Compartment-Specific Proteomic Content of Fusosomes

[1301] This Example describes quantification of the proportion of proteins that are known to be derived from specific cellular compartments in fusosomes, fusosome parental cells, and exosomes.

[1302] Fusosomes and parental cells were prepared as described herein by the method of Examples 65 and 84. Exosomes were prepared as described herein for fusosomes by the method of Examples 65 and 84 with the exception that the parental cells were not transfected with VSV-G or GFP. Protein quantification by mass spectrometry for fusosomes and exosomes was performed as described herein in Example 33. The resulting protein quantification data was analyzed to determine protein levels and proportions of known exosomal, endoplasmic reticulum, ribosome, nuclear, and mitochondrial proteins as annotated by Gene Ontology Cellular Compartment annotation terms (exosome: GO:0070062, endoplasmic reticulum: GO:0005783, ribosome: GO:0005840, GO:0022625, GO:0022626, GO:0022627, GO:0044391, GO:0042788, GO:0000313) with evidence code IDA (inferred by direct assay). The fraction of compartment-specific proteins relative to total protein in each sample was determined for fusosome samples, exosome samples, and parental cells.

[1303] As shown in FIG. 20, fusosomes were found to be depleted with endoplasmic reticulum protein compared to parental cells and exosomes. Fusosomes were also found to be depleted for exosomal protein compared to exosomes. Fusosomes were depleted for mitochondrial protein compared to parental cells. Fusosomes were enriched for nuclear protein compared to parental cells. Fusosomes were enriched for ribosomal proteins compared to parental cells and exosomes.

### Example 96: Measuring TSG101 and ARRDC1 Content in Fusosomes

[1304] This Example describes quantification of the proportion of proteins that are known to be important in fusosome release from cells.

[1305] Fusosomes and parental cells were prepared as described herein by the method of Examples 65 and 84. Exosomes were prepared as described herein for fusosomes by the method of Examples 65 and 84 with the exception that the parental cells were not transfected with VSV-G or GFP. Protein quantification by mass spectrometry for fusosomes and exosomes was performed as described herein in Example 33. The resulting protein quantification data was analyzed to determine protein levels and proportions of the protein TSG101 and ARRDC1. Average log intensities per group were calculated by adding 1 to intensity values from mass spectrometry, transforming by log 10, and computing the mean across replicates. The percentage of total protein content of TSG101 or ARRDC1 in fusosomes relative to exosomes or parental cells was determined as the average log intensity of TSG101 or ARRDC1 for each sample, divided by the sum of intensities of all proteins in the same sample, averaged over replicates and expressed as a percent.

[1306] As shown in FIG. 21, ARRDC1 was found to be present at greater levels as a percentage of total protein content in fusosomes than in parental cells or exosomes. The level of ARRDC1 as a percentage of total protein content was at least 0.02% in fusosomes. TSG101 was found to be present at greater levels as a percentage of total protein content in fusosomes than in parental cells or exosomes. The level of TSG101 as a percentage of total protein content was at least 0.004% in fusosomes.

### Example 97: Measuring Serum Inactivation of Fusosomes after Multiple Administrations

[1307] This Example describes quantification of serum inactivation of fusosomes using an in vitro delivery assay following multiple administrations of the fusosome. It is contemplated that a modified fusosome, e.g., modified by a method described herein, can have a reduced (e.g., reduced compared to administration of an unmodified fusosome) serum inactivation following multiple (e.g., more than one, e.g., 2 or more), administrations of the modified fusosome. In some instances, a fusosome described herein will not be inactivated by serum following multiple administrations.

[1308] A measure of immunogenicity for fusosomes is serum inactivation. In an embodiment, repeated injections of a fusosome can lead to the development of anti-fusosome antibodies, e.g., antibodies that recognize fusosomes. In an embodiment, antibodies that recognize fusosomes can bind in a manner that can limit fusosome activity or longevity and mediate complement degradation.

[1309] In this Example, serum inactivation is examined after one or more administrations of fusosomes. Fusosomes are produced by any one of the previous Examples. In this example, fusosomes are generated from: HEK293 cells modified with a lentiviral-mediated expression of HLA-G (hereafter HEK293-HLA-G), and HEK293 modified with a lentiviral-mediated expression of an empty vector (hereafter HEK293). In some embodiments, fusosomes are derived from cells that are expressing other immunoregulatory proteins.

[1310] Serum is drawn from the different cohorts: mice injected systemically and/or locally with 1, 2, 3, 5, 10 injections of vehicle (Fusosome naïve group), HEK293-HLA-G fusosomes, or HEK293 fusosomes. Sera are collected from mice by collecting fresh whole blood and allowing it to clot completely for several hours. Clots are pelleted by centrifugation and the serum supernatants are removed. A negative control is heat inactivated mouse serum. Negative control samples are heated at 56 degrees Celsius for 1 hour. Serum may be frozen in aliquots.

[1311] The fusosomes are tested for the dose at which 50% of cells in a recipient population receive the payload in the fusosomes. The fusosomes may be produced via any of the other examples described herein and may contain any of the payloads described herein. Many methods for assaying fusosome delivery of a payload to recipient cells are also described herein. In this particular example, the payload is Cre protein and the recipient cells are RPMI8226 cell which stably-expresses “LoxP-GFP-stop-LoxP-RFP” cassette under a CMV promoter, which upon recombination by Cre switches from GFP to RFP expression, indicating fusion and Cre, as a marker, of delivery. The identified dose at which 50% of the recipient cells are RFP positive is used for further experiments. In other embodiments, the identified dose at which 50% of the recipient cells receive the payload is used for further experiments.

[1312] To assess serum inactivation of fusosomes, fusosomes are diluted 1:5 into normal or heat-inactivated serum (or medium containing 10% heat-inactivated FBS as the no-serum control) and the mixture is incubated at 37 C for 1 h. Following the incubation, medium is added to the reaction for an additional 1:5 dilution and then serially diluted twice at a 1:10 ratio. Following this step, the fusosomes should be present at the previously identified dose at which 50% of the recipient cells have received the payload (e.g. are RFP positive). It is contemplated that the identified dose at which 50% of recipient cells receive the payload may be similar across fusosomes.

[1313] Fusosomes that have been exposed to serum are then incubated with recipient cells. The percent of cells which receive the payload, and thus are RFP positive, is calculated. The percent of cells which receive the payload may not be different between fusosome samples that have been incubated with serum and heat-inactivated serum from mice treated with HEK293-HLA-G fusosomes, indicating that there is not serum inactivation of fusosomes or an adaptive immune response. The percent of cells that receive the payload may not be different between fusosome samples that have been incubated from mice treated 1, 2, 3, 5 or 10 times with HEK293-HLA-G fusosomes, which would indicate that there was not serum inactivation of fusosomes or an adaptive immune response. In some instances, the percent of cells which receive the payload is not different between fusosome samples that have been incubated with serum from mice treated with vehicle and from mice treated with HEK293-HLA-G fusosomes, indicating that there is not serum inactivation of fusosomes or an adaptive immune response. In some instances, the percent of cells which receive the payload is less for fusosomes derived with HEK293 than for HEK293-HLA-G fusosomes, indicating that there is not serum inactivation of HEK293-HLA-G fusosomes or an adaptive immune response.

### Example 98: Measuring Complement Targeting of Fusosomes

[1314] This Example describes quantification of complement activity against fusosomes using an in vitro assay. It is contemplated that a modified fusosome described herein can induce reduced complement activity compared to a corresponding unmodified fusosome.

[1315] In this Example, serum from a mouse is assessed for complement activity against a fusosome. The example measures the level of complement C3a, which is a central node in all complement pathways. Notably, the methods described herein may be equally applicable to humans, rats, monkeys with optimization to the protocol.

[1316] In this Example, fusosomes are produced by any one of the previous Examples. Fusosomes are generated from HEK293 cells modified with a lentiviral-mediated expression of a complement regulatory protein DAF (HEK293-DAF fusosomes) or HEK 293 cells not expressing a complementary regulatory protein (HEK293 fusosomes). Other complement regulatory proteins may also be used, such as proteins that bind decay-accelerating factor (DAF, CD55), e.g. factor H (FH)-like protein-1 (FHL-1), e.g. C4b-binding protein (C4B P), e.g. complement receptor 1 (CD35), e.g. Membrane cofactor protein (MCP, CD46), eg. Profectin (CD59), e.g. proteins that inhibit the classical and alternative complement pathway CD/C5 convertase enzymes, e.g. proteins that regulate MAC assembly

[1317] Serum is recovered from naïve mice, mice that are administered HEK293-DAF fusosomes, or mice that are administered HEK293 fusosomes. Sera are collected from mice by collecting fresh whole blood and allowing it to clot completely for several hours. Clots are pelleted by centrifugation and the serum supernatants are removed. A negative control is heat inactivated mouse serum. Negative control samples are heated at 56 degrees Celsius for 1 hour. Serum may be frozen in aliquots.

[1318] The different fusosomes are tested for the dose at which 50% of cells in a recipient population receive the payload in the fusosomes. The fusosomes may be produced via any of the other examples described herein and may contain any of the payloads described herein. Many methods for assaying fusosome delivery of a payload to recipient cells are also described herein. In this particular example, the payload is Cre protein and the recipient cells are RPMI8226 cell which stably-expresses “LoxP-GFP-stop-LoxP-RFP” cassette under a CMV promoter, which upon recombination by Cre switches from GFP to RFP expression, indicating fusion and Cre, as a marker, of delivery. The identified dose at which 50% of the recipient cells are RFP positive is used for further experiments. In other embodiments, the identified dose at which 50% of the recipient cells receive the payload is used for further experiments. In preferred embodiments, the identified dose at which 50% of recipient cells receive the payload is similar across fusosomes.

[1319] Two-fold dilutions of the fusosomes starting at the dose of fusosomes at which 50% of the recipient cells receive the payload in phosphate-buffered saline (PBS, pH 7.4) are mixed with a 1:10 dilution of the sera from mice treated with the same fusosomes or naïve mice (assay volume, 20 μl) and incubated for 1 h at 37° C. The samples are further diluted 1:500 and used in an enzyme-linked immunosorbent assay (ELISA) specific for C3a. The ELISA is mouse complement C3a ELISA Kit product LS-F4210 sold by LifeSpan BioSciences Inc, which measures the concentration of C3a in a sample. The dose of fusosomes at which 200 pg/ml of C3a is present is compared across sera isolated from mice.

[1320] In some instances, the dose of fusosomes at which 200 pg/ml of C3a is present is greater for HEK293-DAF fusosomes incubated with HEK-293 DAF mouse sera than for HEK293 fusosomes incubated with HEK293 mouse sera, indicating that complement activity targeting fusosomes is greater in mice treated with HEK293 fusosomes than HEK293-DAF fusosomes. In some instances, the dose of fusosomes at which 200 pg/ml of C3a is present is greater for HEK293-DAF fusosomes incubated with naive mouse sera than for HEK293 fusosomes incubated with naive mouse sera, indicating that complement activity targeting fusosomes is greater in mice treated with HEK293 fusosomes than HEK293-DAF fusosomes.

### Example 99: Treatment for Fanconi Anemia with VSV-G Pseudotype In Vitro

[1321] This example describes delivery of a therapeutic transgene to cells in vitro. In this example, the therapeutic transgene is Fanconi anemia, complementation group C (Fancc).

[1322] Bone marrow cells are derived from Fancc^{-/-} mice (Whitney et al., 1996, Blood 88:49-58). The bone marrow cells are isolated as described in Galimi et al., 2002, Blood 100:2732-36. The bone marrow cells are transduced with a retroviral vector produced as described herein or with PBS. The retroviral vector is pseudotyped with VSV-G and carries the Fancc gene under the control of a hematopoietic stem cell-specific promoter (a positive TCSRE) and pDC restrictive microRNA sequence (a NTCSRE).

[1323] Following sufficient time for Fancc expression, the cells are analyzed by flow cytometry. The cells are fixed, permeabilized, and immunostained with an anti-Fancc antibody (for example, abcam catalog number ab97575). Following immunostaining, the cells are counterstained with a secondary antibody conjugated to Alexa Fluor 488 (for example, abcam catalog number ab150077). In some embodiments, the level of Fancc expression per cell is higher in CD34+ bone marrow cells treated with the retroviral vector than in bone marrow cells treated with PBS.

[1324] In some embodiments, the level of Fancc expression per cell will be higher in bone marrow cells treated with the retroviral vector encoding the Fancc gene than in bone marrow cells treated with PBS.

### Example 100: Treatment for Fanconia Anemia with VSV-G Pseudotyped Retrovirus In Vivo

[1325] This example describes delivery of a therapeutic transgene to cells in vivo. In this example, the therapeutic transgene is Fanconi anemia, complementation group C (Fancc).

[1326] Fancc^{-/-} mice are treated with retroviral vector pseudotyped with VSV-G and carrying the Fancc gene agent under the control of a hematopoietic stem cell-specific promoter (a positive TCSRE) and pDC cell restrictive microRNA sequence (a NTCSRE). The retroviral vector is produced via any of the methods described in this application. Negative control mice are treated with PBS. One week following treatment, the mice are administered a single dose of 40 mg/kg cyclophosphamide (CPA) intraperitoneally.

[1327] 28 days following treatment, bone marrow cells are obtained from mice treated with retrovirus or PBS and stained for Fancc expression as described in previous examples. In some embodiments, the level of Fancc expression per cell will be higher in bone marrow cells derived from mice treated with the retroviral vector encoding the Fancc gene than in mice treated with PBS.

[1328] In a separate group of mice, 28 days after treatment with retrovirus or PBS the mice are exposed to weekly doses of 0.3 mg/kg mitomycin C. Platelet counts (PC) are analyzed at 2, 4, 6, and 8 weeks following initiation of treatment. Typically, normal mice are resistant to MMC and do not develop thrombocytopenia, while fancc−/− mice rapidly developed PC abnormalities leading most of them to death within 6 weeks. In some embodiments, mutant mice treated by lentiviral gene therapy and subsequent CPA selection will be protected from the thrombocytopenia and death induced by MMC.

The application's sequence listing, which the Patent Office published only in electronic form, follows.

SEQUENCE LISTING (209 sequences)

SEQ ID NO: 1 - protein, 589 aa, Human respiratory syncytial virus
  MISC_FEATURE: fusion glycoprotein
MIPQARTELNLGQITMELLIHRSSAIFLTLAINALYLTSSQNITEEFYQSTCSAVSRGYLSALRTGWYTSVITIELSNIKETKCNGTDTKVKLIKQELDKYKNAVTELQLLMQNTPAANNRARREAPQYMNYTINTTGSLNVSISKKRKRRFLGFLLGVGSAIASGIAVSKVLHLEGEVNKIKNALLSTNKAVVSLSNGVSVLTSKVLDLKNYINNQLLPIVNQQSCRISNIETVIEFQQKNSRLLEITREFSVNAGVTTPLSTYMLTNSELLSLINDMPITNDQKKLMSSNVQIVRQQSYSIMSIIKEEVLAYVVQLPIYGVIDTPCWKLHTSPLCTTNIKEGSNICLTRTDRGWYCDNAGSVSFFPQADTCKVQSNRVFCDTMNSLTLPSEVSLCNTDIFNSKYDCKIMTSKTDISSSVITSLGAIVSCYGKTKCTASNKNRGIIKTFSNGCDYVSNKGVDTVSVGNTLYYVNKLEGKNLYVKGEPIINYYDPLVFPSDEFDASISQVNEKINQSLAFIRRSDELLHNVNTGKSTTNIMITAIIIVIIVVLLSLIAIGLLLYCKAKNTPVTLSKDQLSGINNIAFSK

SEQ ID NO: 2 - protein, 553 aa, Newcastle disease virus
  MISC_FEATURE: fusion protein
MDPKPSTSYLHAFPLIFVAISLVFMAGRASALDGRPLAAAGIVVTGDKAVNIYTSSQTGTIIIKLLPNMPKDKEQCAKSPLDAYNRTLTTLLAPLGDSIRRIQESVTTSGGERQERLVGAIIGGVALGVATAAQITAASALIQANQNAANILKLKESIAATNEAVHEVTSGLSQLAVAVGKMQQFVNDQFNKTAQEIDCIKITQQVGVELNLYLTELTTVFGPQITSPALTQLTIQALYNLAGGNMDYMLTKLGVGNNQLSSLISSGLISGNPILYDSQTQLLGIQVTLPSVGNLNNMRATYLETLSVSTNKGFASALVPKVVTQVGSVIEELDTSYCIETDLDLYCTRIVTFPMSPGIFSCLGGNTSACMYSKTEGALTTPYMTLKGSVIANCKMTTCRCADPPGIISQNYGEAVSLIDKKVCNILTLDGITLRLSGEFDATYQKNISIQDSQVVITGNLDISTELGNVNNSISNALDKLEESNSKLDKVNVRLTSTSALITYIVLTTIALICGIVSLVLACYIMYKQKAQQKTLLWLGNNTLDQMRATTKM

SEQ ID NO: 3 - protein, 553 aa, Measles virus strain AIK-C
  MISC_FEATURE: fusion protein
MSIMGLKVNVSAIFMAVLLTLQTPTGQIHWGNLSKIGVVGIGSASYKVMTRSSHQSLVIKLMPNITLLNNCTRVEIAEYRRLLRTVLEPIRDALNAMTQNIRPVQSVASSRRHKRFAGVVLAGAALGVATAAQITAGIALHQSMLNSQAIDNLRASLETTNQAIEAIRQAGQEMILAVQGVQDYINNELIPSMNQLSCDLIGQKLGLKLLRYYTEILSLFGPSLRDPISAEISIQALSYALGGDINKVLEKLGYSGGDLLGILESRGIKARITHVDTESYFIVLSIAYPTLSEIKGVIVHRLEGVSYNIGSQEWYTTVPKYVATQGYLISNFDESSCTFMPEGTVCSQNALYPMSPLLQECLRGYTKSCARTLVSGSFGNRFILSQGNLIANCASILCKCYTTGTIINQDPDKILTYIAADNCPVVEVNGVTIQVGSRRYPDAVYLHRIDLGPPILLERLDVGTNLGNAIAKLEDAKELLESSDQILRSMKGLSSTCIVYILIAVCLGGLIGIPALICCCRGRCNKKGEQVGMSRPGLKPDLTGTSKSYVRSL

SEQ ID NO: 4 - protein, 539 aa, Human metapneumovirus
  MISC_FEATURE: fusion glycoprotein precursor
MSWKVVIIFSLLITPQHGLKESYLEESCSTITEGYLSVLRTGWYTNVFTLEVGDVENLTCSDGPSLIKTELDLTKSALRELKTVSADQLAREEQIEKPRQSRFVLGAIALGVATAAAVTAGVAIAKTIRLESEVTAIKNALKTTNEAVSTLGNGVRVLATAVRELKDFVSKNLTRAINKNKCDIDDLKMAVSFSQFNRRFLNVVRQFSDNAGITPAISLDLMTDAELARAVSNMPTSAGQIKLMLENRAMVRRKGFGILIGVYGSSVIYMVQLPIFGVIDTPCWIVKAAPSCSEKKGNYACLLREDQGWYCQNAGSTVYYPNEKDCETRGDHVFCDTAAGINVAEQSKECNINISTTNYPCKVSTGRHPISMVALSPLGALVACYKGVSCSIGSNRVGIIKQLNKGCSYITNQDADTVTIDNTVYQLSKVEGEQHVIKGRPVSSSFDPIKFPEDQFNVALDQVFENIENSQALVDQSNRILSSAEKGNTGFIIVIILIAVLGSSMILVSIFIIIKKTKKPTGAPPELSGVTNNGFIPHS

SEQ ID NO: 5 - protein, 540 aa, Bovine parainfluenza virus 3
  MISC_FEATURE: fusion protein
MIIIVITMILSLTPSSLCQIDITKLQSVGVLVNSPKGIKISQNFETRYLILSLIPKIEDSHSCGNQQIDQYKKLLDRLIIPLYDGLKLQKDVIVVNHESHNNTNLRTKRFFGEIIGTIAIGIATSAQITAAVALVEAKQARSDIDKLKEAIKDTNKAVQSIQSSVGNLIVAVKSVQDYVNNEIVPSITRLGCEAAGLQLGIALTQHYSELTNIFGDNIGTLGEKGVKLQGIASLYRTNITEVFTTSTVDQYDIYDLLFTESIKMRVIDVDLSDYSITLQVRLPLLTKVSNTQIYKVDSISYNIQGKEWYIPLPHHIMTKGAFLGGADIKECIESFSNYICPSDPGFILNHEMENCLSGNITQCPKTIVTSDIVPRYAFVDGGVIANCIPTTCTCNGIDNRINQSPDQGIKIITYKECQIVGINGMLFKTNQEGTLAKYTFDNIKLNNSVALNPIDISLELNKAKSDLEESKRWIEKSNQKLDSIGSWHQSSVTIIIIIVMIVVLLIINAIIIMIMIRYLRDRNRHLNNKDSEPYVLTNRQ

SEQ ID NO: 6 - protein, 538 aa, Mumps virus
  MISC_FEATURE: fusion protein
MKVFLVTCLGFAVFSSSVCVNINILQQIGYIKQQVRQLSYYSQSSSSYIVVKLLPNIQPTDNSCEFKSVTQYNKTLSNLLLPIAENINNIASPSSGSRRHKRFAGIAIGIAALGVATAAQVTAAVSLVQAQTNARAIAAMKNSIQATNRAVFEVKEGTQRLAIAVQAIQDHINTIMNTQLNNMSCQILDNQLATSLGLYLTELTTVFQPQLINPALSPISIQALRSLLGSMTPAVVQATLSTSISAAEILSAGLMEGQIVSVLLDEMQMIVKINIPTIVTQSNALVIDFYSISSFINNQESIIQLPDRILEIGNEQWSYPAKNCKLTRHHIFCQYNEAERLSLESKLCLAGNISACVFSPIAGSYMRRFVALDGTIVANCRSLTCLCKSPSYPIYQPDHHAVTTIDLTACQTLSLDGLDFSIVSLSNITYAENLTISLSQTINTQPIDISTELSKVNASLQNAVKYIKESNHQLQSVNVNSKIGAIIVAALVLSILSIIISLLFCCWAYVATKEIRRINFKTNHINTISSSVDDLIRY

SEQ ID NO: 7 - protein, 671 aa, Canine distemper virus
  MISC_FEATURE: fusion protein
MNPHEQTIPMHEKIPKRSKTQTHTQQDLPQQHSTKSAESKTSRARHSITSAQRSTHYDPRTADWPDYYIMKRTRSCKQASYRSDNIPAHGDHDGIIHHTPESVSQGAKSRLKMGQSNAVKSGSQCTWLVLWCIGVASLFLCSKAQIHWNNLSTIGIIGTDSVHYKIMTRPSHQYLVIKLMPNVSLIDNCTKAELDEYEKLLSSILEPINQALTLMTKNVKPLQSVGSGRRQRRFAGVVLAGAALGVATAAQITAGIALHQSNLNAQAIQSLRTSLEQSNKAIEEIREATQETVIAVQGVQDYVNNELVPAMQHMSCELVGQRLGLKLLRYYTELLSIFGPSLRDPISAEISIQALSYALGGEIHKILEKLGYSGNDMIAILESRGIKTKITHVDLPGKFIILSVSYPTLSEVKGVIVHRLEAVSYNIGSQEWYTTVPRYVATNGYLISNFDESSCVFVSESAICSQNSLYPMSPLLQQCIRGDTSSCARTLVSGTMGNKFILSKGNIVANCASILCKCYSTSTIINQSPDKLLTFIASDTCPLVEIDGVTIQVGSRQYPDMVYESKVALGPAISLERLDVGTNLGNALKKLDDAKVLIDSSNQILETVRRSSFNFGSLLSVPILSCTALALLLLICCCKRRYQQTHKQNTKVDPTFKPDLTGTSRSYVRSL

SEQ ID NO: 8 - protein, 546 aa, Peste-des-petits-ruminants virus
  MISC_FEATURE: fusion protein
MTRVAILTFLFLFPNAVACQIHWGNLSKIGIVGTGSASYKVMTRPSHQTLVIKLMPNITAIDNCTKSEIAEYKRLLITVLKPVEDALSVITKNVRPIQTLTPGRRTRRFAGAVLAGVALGVATAAQITAGVALHQSLMNSQAIESLKTSLEKSNQAIEEIRLANKETILAVQGVQDYINNELVPSVHRMSCELVGHKLGLKLLRYYTEILSIFGPSLRDPIAAEISIQALSYALGGDINRILDKLGYSGGDFLAILESKGIKARVTYVDTRDYFIILSIAYPTLSEIKGVIVHKIEAITYNIGAQEWYTTIPKYVATQGYLISNFDETSCVFTPDGTVCSQNALYPMSPLLQECFQGSTKSCARTLVSGTISNRFILSKGNLIANCASVLCKCYTTETVISQDPDKLLTVVASDKCPVVEVDGVTIQVGSREYPDSVYLHKIDLGPAISLEKLDVGTNLGNAVTRLENAKELLDASDQILKTVKGVPFGGNMYIALAACIGVSLGLVTLICCCKGRCKNKEVPISKINPGLKPDLTGTSKSYVRSL

SEQ ID NO: 9 - protein, 546 aa, Hendra virus
  MISC_FEATURE: fusion
MATQEVRLKCLLCGIIVLVLSLEGLGILHYEKLSKIGLVKGITRKYKIKSNPLTKDIVIKMIPNVSNVSKCTGTVMENYKSRLTGILSPIKGAIELYNNNTHDLVGDVKLAGVVMAGIAIGIATAAQITAGVALYEAMKNADNINKLKSSIESTNEAVVKLQETAEKTVYVLTALQDYINTNLVPTIDQISCKQTELALDLALSKYLSDLLFVFGPNLQDPVSNSMTIQAISQAFGGNYETLLRTLGYATEDFDDLLESDSIAGQIVYVDLSSYYIIVRVYFPILTEIQQAYVQELLPVSFNNDNSEWISIVPNFVLIRNTLISNIEVKYCLITKKSVICNQDYATPMTASVRECLTGSTDKCPRELVVSSHVPRFALSGGVLFANCISVTCQCQTTGRAISQSGEQTLLMIDNTTCTTVVLGNIIISLGKYLGSINYNSESIAVGPPVYTDKVDISSQISSMNQSLQQSKDYIKEAQKILDTVNPSLISMLSMIILYVLSIAALCIGLITFISFVIVEKKRGNYSRLDDRQVRPVSNGDLYYIGT

SEQ ID NO: 10 - protein, 565 aa, Sendai virus
  MISC_FEATURE: fusion protein
MATYIQRVQCISALLSVVLTTLVSCQIPRDRLSNIGVIVDEGKSLKIAGSHESRYIVLSLVPGIDLENGCGTAQVIQYKSLLNRLLIPLRDALDLQEALITVTNDTMTGADVPQSRFFGAVIGTIALGVATSAQITAGIALAEAREAKRDIALIKESMTKTHKSIELLQNAVGEQILALKTLQDFVNDEIKPAISELGCETAALRLGIKLTQHYSELLTAFGSNFGTIGEKSLTLQALSSLYSANITEIMTTIRTGQSNIYDVIYTEQIKGTVIDVDLERYMVTLSVKIPILSEVPGVLIHKASSISYNIDGEEWYVTVPSHILSRASFLGGANIADCVESRLTYICPRDPAQLIPDSQQKCILGDTTRCPVTKVVDNIIPKFAFVNGGVVANCIASTCTCGTGRRPISQDRSKGVVFLTHDNCGLIGVNGIELYANRKGHDATWGVQNLTVGPAIAIRPVDISLNLAAATDFLQDSRAELEKARKILSEVGRWYNSGATLITIIVVMIVVLVVIIVIVIVLYRLRRSMLMSNPAGRISRDTYTLEPKIRHMYTNGGFDAMTEKR

SEQ ID NO: 11 - protein, 555 aa, Human parainfluenza virus 1 strain Washington/1964
  MISC_FEATURE: F glycoprotein
MQKSEILFLVYSSLLLSSSLCQIPVEKLSNVGVIINEGKLLKIAGSYESRYIVLSLVPSIDLQDGCGTTQIIQYKNLLNRLLIPLKDALDLQESLITITNDTTVTNDNPQTRFFGAVIGTIALGVATAAQITAGIALAEAREARKDIALIKDSIVKTHNSVELIQRGIGEQIIALKTLQDFVNDEIRPAIGELRCETTALKLGIKLTQHYSELATAFSSNLGTIGEKSLTLQALSSLYSANITEILSTTKKDKSDIYDIIYTEQVKGTVIDVDLEKYMVTLLVKIPILSEIPGVLIYRASSISYNIEGEEWHVAIPNYIINKASSLGGADVTNCIESKLAYICPRDPTQLIPDNQQKCILGDVSKCPVTKVINNLVPKFAFINGGVVANCIASTCTCGTNRIPVNQDRSRGVTFLTYTNCGLIGINGIELYANKRGRDTTWGNQIIKVGPAVSIRPVDISLNLASATNFLEESKTELMKARAIISAVGGWHNTESTQIIMIIIVCILIIIICGILYYLYRVRRLLVMINSTHNSPVNAYTLESRMRNPYMGNNSN

SEQ ID NO: 12 - protein, 543 aa, Feline morbillivirus
  MISC_FEATURE: fusion protein
MGKIRVIIISSLLLSNITTAQVGWDNLTSIGVISTKQYDYKITTLNTNQLMVIKMVPNISSIINCTKPELMKYRELVLGVIRPINESLELMNSYINMRAGSERFIGAVIAGVALGVATAAQITSGIALHNSIMNKRQIQELRKALSTTNKAIDEIRIAGERTLIAVQGVQDYINNIIIPMQDKLQCDILSSQLAIALLRYYTNILTVFGPSIRDPVTSIISIQALSQAFNGNLQALLDGLGYTGRDLRDLLESRSITGQIIHADMTDLFLVLRINYPSITEMQGVTIYELNSITYHIGPEEWYTIMPNFIAVQGFLTSNFDERKCSITKSSILCQQNSIYPMSTEMQRCIKGEIRFCPRSKAVGTLVNRFILTKGNLMANCLGVICRCYSSGQIITQDPSKLITIISQEECKEVGVDGIRIMVGPRKLPDVIFNARLEVGVPISLSKLDVGTDLAIASAKLNNSKALLEQSDKILDSMSKLDSINSRITGLILAIMAIFIITVTIIWIIYKRCRNKDNKFSTSIEPLYIPPSYNSPHSVVKSI

SEQ ID NO: 13 - protein, 534 aa, Avian paramyxovirus 2
  MISC_FEATURE: Fusion protein
MIAALFISLFATCGALDNSVLAPVGIASAQEWQLAAYTNTLSGTIAVRFVPVLPGNLSTCAQATLAEYNKTVTNILGPLKENLETLLSEPTKTAARFVGAIIGTVALGVATSAQITAAVALNQAQENARNIWRLKESIRKTNEAVLELKDGLASTAIALDKVQKFINEDIIPQIKEIDCQVVANKLGVYLSLYLTELTTIFGAQITNPALTPLSYQALYNLCGGDMGKLTELIGVKAKDINSLYEANLITGQVIGYDSESQIILIQVSYPSVSEVTGVRATELVTVSVTTPKGEGRAIAPKYVAQSRVVTEELDTSTCRFSKTTLYCRSIITRPLPPLIANCLNGLYQDCQYTTEIGALSSRFITVNGGIIANCRATICKCVNPPKIIVQSDASSLTVIDSAICKDVVLDNVQLRLEGKLSAQYFTNITIDLSQITTSGSLDISSEIGSINNTVNKVEELIAESNAWLQAVNPHLVNNTSIIVLCVLAAIFVVWLVALTGCLAYYIKKSSATRMVGIGSSPAGNPYVAQSATKM

SEQ ID NO: 14 - protein, 555 aa, Avian paramyxovirus 6
  MISC_FEATURE: fusion protein
MGARLGPLAMAPGRYVIIFNLILLHRVVSLDNSRLLQQGIMSATEREIKVYTNSITGSIAVRLIPNLPQEVLKCSAGQIKSYNDTLNRIFTPIKANLERLLATPSMLEDNQNPAPEPRLIGAIIGTAALGLATAAQVTAALALNQAQDNAKAILNLKESITKTNEAVLELKDATGQIAIALDKTQRFINDNILPAINNLTCEVAGAKVGVELSLYLTELSTVFGSQITNPALSTLSIQALMSLCGNDFNYLLNLMGAKHSDLGALYEANLINGRIIQYDQASQIMVIQVSVPSISSISGLRLTELFTLSIETPVGEGKAVVPQFVVESGQLLEEIDTQACTLTDTTAYCTIVRTKPLPELVAQCLRGDESRCQYTTGIGMLESRFGVFDGLVIANCKATICRCLAPEMIITQNKGLPLTVISQETCKRILIDGVTLQIEAQVSGSYSRNITVGNSQIAPSGPLDISSELGKVNQSLSNVEDLIDQSNQLLNRVNPNIVNNTAIIVTIVLLVLLVLWCLALTISILYVSKHAVRMIKTVPNPYVMQAKSPGSATQF

SEQ ID NO: 15 - protein, 545 aa, Fer-de-Lance paramyxovirus
  MISC_FEATURE: fusion protein F
MTRITILQIILTLTLPVMCQVSFDNLEQVGVMFDKPKFLKITGPASTATMIIKLIPTLGTMESCGTSAVNEYKKTLDTILVPLRDTINKLSTDITVVEGTSNISNKREKRFVGIAIAVGAVALATSAQITAGIALSNTIKNAEAIESIKSSIQASNQAIQKVIDAQGRTVTVINGIQDHINSVINPALNQLGCDVAKNTLAISLTQYFSKLSLLFGPNLRNPVEQPLSVQAIAGLMDGDINAVVSQLGYTQSDLLDLLSTESIVGTVTAIDMVNYMIQIEMSFPQYITIPDTKVLEGHKITFNDKGSEWQTQVPSTIAVRDILIAGVDPDGCSITSTSYICKNDPTYAMSEVLTNCFRGNTQECPRARITSTFATRFAIARSTVIANCVAAVCLCGDPGIPVVQKAEVTLTAMTLDQCSLITVDGLQIKPSKSIANVTANFGNITLGPVVSVGDLDLSAELTKVQSDLKEAQDKLDESNAILQGINNKILTAPTSIALIVVSVVVILLIIGMISWLVWLTKAVRRSNTRSERVTPSAYNNLGFIK

SEQ ID NO: 16 - protein, 566 aa, Avian paramyxovirus 4
  MISC_FEATURE: fusion protein
MRLSRTILTLILGTLTGYLMGAHSTNVNEGPKSEGIRGDLIPGAGIFVTQVRQLQIYQQSGYHDLVIRLLPLLPAELNDCQREVVTEYNNTVSQLLQPIKTNLDTLLADGGTRDADIQPRFIGAIIATGALAVATVAEVTAAQALSQSKTNAQNILKLRDSIQATNQAVFEISQGLEATATVLSKLQTELNENIIPSLNNLSCAAMGNRLGVSLSLYLTLMTTLFGDQITNPVLTPISYSTLSAMAGGHIGPVMSKILAGSVTSQLGAEQLIASGLIQSQVVGYDSQYQLLVIRVNLVRIQEVQNTRVVSLRTLAVNRDGGLYRAQVPPEVVERSGIAERFYADDCVLTTTDYICSSIRSSRLNPELVKCLSGALDSCTFERESALLSTPFFVYNKAVVANCKAATCRCNKPPSIIAQYSASALVTITTDTCADLEIEGYRFNIQTESNSWVAPNFTVSTSQIVSVDPIDISSDIAKINSSIEAAREQLELSNQILSRINPRIVNDESLIAIIVTIVVLSLLVIGLIVVLGVMYKNLKKVQRAQAAMMMQQMSSSQPVTTKLGTPF

SEQ ID NO: 17 - protein, 551 aa, Human parainfluenza virus 2
  MISC_FEATURE: fusion protein
MHHLHPMIVCIFVMYTGIVGSDAIAGDQLLNIGVIQSKIRSLMYYTDGGASFIVVKLLPNLPPSNGTCNITSLDAYNVTLFKLLTPLIENLSKISTVTDTKTRQKRFAGVVVGLAALGVATAAQITAAVAIVKANANAAAINNLASSIQSTNKAVSDVIDASRTIATAVQAIQDRINGAIVNGITSASCRAHDALIGSILNLYLTELTTIFHNQITNPALTPLSIQALRILLGSTLPIVIESKLNTNFNTAELLSSGLLTGQIISISPMYMQMLIQINVPTFIMQPGAKVIDLIAISANHKLQEVVVQVPNRILEYANELQNYPANDCVVTPNSVFCRYNEGSPIPESQYQCLRGNLNSCTFTPIIGNFLKRFAFANGVLYANCKSLLCRCADPPHVVSQDDTQGISIIDIKRCSEMMLDTFSFRITSTFNATYVTDFSMINANIVHLSPLDLSNQINSINKSLKSAEDWIADSNFFANQARTAKTLYSLSAIALILSVITLVVVGLLIAYIIKLVSQIHQFRSLAATTMFHRENPAFFSKNNHGNIYGIS

SEQ ID NO: 18 - protein, 541 aa, Porcine rubulavirus
  MISC_FEATURE: fusion protein
MPQQQVAHTCVMLWGIISTVSGINTEALSQYGVVVTNVRQLTYYTQAGSTYLAVRLLPSLASPDQSCALHSIINYNATLQAILSPIAENLNLISTALREQHRKKRFAGVAIGLTALGVATAAQATAAVALVRANKNAEKVEQLSQALGETNAAISDLIDATKNLGFAVQAIQNQINTAILPQIHNLSCQVIDAQLGNILSLYLTELTTVFQPQLTNPALSPLTIQALRAVLGTTLPALLSEKLKSNIPLGDLMSSGLLKGQLVGLNLQNMLMIIELYIPTLSTHSTAKVLDLVTISSHVNGREVEIQVPNRVLELGSEVLGYGGSECALTMSHILCPFNDARVLSTDMKYCLQGNITHCIFSPVVGSFLRRFALVNGVVIANCADMSCVCFDPQEIIYQNFQEPTTVIDIKKCGKVQLDTLTFTISTFANRTYGPPAYVPPDNIIQSEPLDISGNLIAVNNSLSSALNHLATSEILRNEQIWTSSLGISTIVALVIIGILIICLVVTWAALWALLKEVRGLNSAVNSQLSSYVMGDKFIRY

SEQ ID NO: 19 - protein, 551 aa, Parainfluenza virus 5
  MISC_FEATURE: fusion protein
MGTRIQFLMVSCLLAGTGSLDPAALMQIGVIPTNVRQLMYYTEASSAFIVVKLMPTIDSPISGCNITSISSYNATMTKLLQPIGENLETIRYQLIPTRRRRRFVGVVIGLAALGVATAAQVTAAVALVKANKNAAAILNLKNAIQKTNAAVADVVQATQSLGTAVQAVQDHINSVVSPAITAANCKAQDAIIGSILNLYLTELTTIFHNQITNPALSPITIQALRILLGSTLPTVVRKSFNTQISAAELLSSGLLTGQIVGLDLTYMQMVIKIELPTLTVQPATQIIDLVTISAFINNREVMAQLPTRIIVTGSLIQAYPASQCTITPNTVYCRYNDAQVLSDDTMACLQGNLTRCTFSPVVGSFLTRFVLFDGIVYANCRSMLCKCMQPAAVILQPSSSPVTVIDMHKCVSLQLDNLRFTITQLANITYNSTIKLETSQILPIDPLDISQNLAAVNKSLSDALQHLAQSDTYLSAITSATTTSVLSIIAICLGSLGLILIILISVVVWKLLTIVAANRNRMENFVYHNSAFHHSRSDLSEKNQPATLGTR

SEQ ID NO: 20 - protein, 537 aa, Murine pneumonia virus
  MISC_FEATURE: fusion glycoprotein precursor
MIPGRIFLVLLVIFNTKPIHPNTLTEKFYESTCSVETAGYKSALRTGWHMTVMSIKLSQINIESCKSSNSLLAHELAIYSSAVDELRTLSSNALKSKRKKRFLGLILGLGAAVTAGVALAKTVQLESEIALIRDAVRNTNEAVVSLTNGMSVLAKVVDDLKNFISKELLPKINRVSCDVHDITAVIRFQQLNKRLLEVSREFSSNAGLTHTVSSFMLTDRELTSIVGGMAVSAGQKEIMLSSKAIMRRNGLAILSSVNADTLVYVIQLPLFGVMDTDCWVIRSSIDCHNIADKYACLARADNGWYCHNAGSLSYFPSPTDCEIHNGYAFCDTLKSLTVPVTSRECNSNMYTTNYDCKISTSKTYVSTAVLTTMGCLVSCYGHNSCTVINNDKGIIRTLPDGCHYISNKGVDRVQVGNTVYYLSKEVGKSIVVRGEPLVLKYDPLSFPDDKFDVAIRDVEHSINQTRTFLKASDQLLDLSENRENKNLNKSYILTTLLFVVMLIIIMAVIGFILYKVLKMIRDNKLKSKSTPGLTVLS

SEQ ID NO: 21 - protein, 543 aa, Human parainfluenza virus 4a
  MISC_FEATURE: Fusion protein
MGVKGLSLIMIGLLISPITNLDITHLMNLGTVPTAIRSLVYYTYTKPSYLTVDLIPNLKNLDQNCNYSSLNYYNKTALSLIQPIADNINRLTKPITSSEIQSRFFGAVIGTIALGVATAAQVTAAIGLAKAQENAKLILTLKKAATETNEAVRDLANSNKIVVKMISAIQNQINTIIQPAIDQINCQIKDLQVANILNLYLTEITTVFHNQLTNPALESISIQALKSLLGPTLPEVLSKLDLNNISAASVMASGLIKGQIIAVDIPTMTLVLMVQIPSISPLRQAKIIDLTSITIHTNSQEVQAVVPARFLEIGSEILGFDGSVCQITKDTIFCPYNDAYELPIQQKRCLQGQTRDCVFTPVAGTFPRRFLTTYGTIVANCRDLVCSCLRPPQIIYQPDENPVTIIDKDLCTTLTLDSITIEIQKSINSTFRREVVLESTQVRSLTPLDLSTDLNQYNQLLKSAEDHIQRSTDYLNSINPSIVNNNAIIILIILCILLILTVTICIIWLKYLTKEVKNVARNQRLNRDADLFYKIPSQIPVPR

SEQ ID NO: 22 - protein, 538 aa, Tioman virus
  MISC_FEATURE: fusion protein
MRIALTAVIVSIHFDLAFPMNKNSLLSVGLVHKSVKNLYFYSQGSPSYIVVKLVPTLGNVPGNCTLNSLVRYKSTVSSLLSPLAENLEYLQKTLTVSRGGRRRRFAGVAIGLAALGVAAAAQATAAVALVEARQNAAQIQSLSEAIQNTNLAVNELKTAIGASATAIQAIQTQINEVINPAINRLSCEILDAQLASMLNLYLIHLTTVFQNQLTNPALTPLSIQSLQSLLQGTSSVLTNITSSSKLALNDALVTGLITGQVVGLNMTSLQIVIAAYVPSVAKLSNAVVHNFIRITTSVNGTEVIIQSPTIIMEQNEVMYDLKTGHCTESDLNIYCPYVDAQLLSPGMTNCINGRLNDCTFSKVVGSFPTRFAAVEGAILANCKYLQCNCLTPPYIITPLNGEMISMIDLSKCQRLDLGTIVFDINNPVNVTFNGNYRADVGQMIVTNPLDISAELNQINTSLSNAQGFLSKSDAWLHVSQWVTNSGTIFIILIIGLIVGIVYMIINTYVVVQIIKEINRMRTSDRAHLLKGSISSIST

SEQ ID NO: 23 - protein, 543 aa, Avian paramyxovirus 8
  MISC_FEATURE: fusion protein
MGQISVYLINSVLLLLVYPVNSIDNTLIAPIGVASANEWQLAAYTTSLSGTIAVRFLPVLPDNMTTCLRETITTYNNTVNNILGPLKSNLDALLSSETYPQTRLIGAVIGSIALGVATSAQITAAVALKQAQDNARNILALKEALSKTNEAVKELSSGLQQTAIALGKIQSFVNEEILPSINQLSCEVTANKLGVYLSLYLTELTTIFGAQLTNPALTSLSYQALYNLCGGNMAMLTQKIGIKQQDVNSLYEAGLITGQVIGYDSQYQLLVIQVNYPSISEVTGVRATELVTVSVTTDKGEGKAIVPQFVAESRVTIEELDVASCKFSSTTLYCRQVNTRALPPLVASCLRGNYDDCQYTTEIGALSSRYITLDGGVLVNCKSIVCRCLNPSKIISQNTNAAVTYVDATICKTIQLDDIQLQLEGSLSSVYARNISIEISQVTTSGSLDISSEIGNINNTVNRVEDLIHQSEEWLAKVNPHIVNNTTLIVLCVLSALAVIWLAVLTAIIIYLRTKLKTISALAVTNTIQSNPYVNQTKRESKF

SEQ ID NO: 24 - protein, 546 aa, Tailam virus
  MISC_FEATURE: Fusion protein
MKLSVVYTTLLVSTFYSDLARSQLALSELTKIGVIPGRSYDLKISTQASYQYMVVKLIPNLTGLNNCTNGTIEAYKKMLNRLLSPIDAALRKMKDAVNDKPPESVGNVKFWGAVIGGVALGVATSAQITAGVALHNSIQNANAILALKDSIRQSNKAIQELQTAMSTTVVVLNALQDQINNQLVPAINSLGCQVVANTLGLKLNQYFSEISLVFGPNLRDPTSETLSIQALSRAFNGDFDSMLSKLKYDDSDFLDLLESDSIRGRIIDVSLSDYLITIQIEYPALLSIKDAVIQTFNLISYNTRGTEWISIFPKQLLVRGTYISNIDISQCVIAATSIICKSDTSTPISSATWSCATGNITNCARTRVVNAHVPRFALYGGVVFANCAPVVCKCQDPLYSINQEPKVTNVMVDVDACKEMYLDGLYITLGKTQISRAMYAEDVSLGGPISVDPIDLGNEINSINSAINRSEEHLNHANELLDKVNPRIVNVKTFGVMIGLLVLVVLWCVITLVWLICLTKQLARTAYAGSMGSRASTVNSLSGFVG

SEQ ID NO: 25 - protein, 557 aa, Porcine parainfluenza virus 1
  MISC_FEATURE: fusion protein
MQVTTLRPAIILSIALLVTGQVPRDKLANLGIIIKDSKALKIAGSYENRYIVLSLVPTIDNVNGCGSIQIAKYKEMLERLLIPIKDALDLQESLIVIDNETVNNNYSPQYRFVGAIIGTIALGVATAAQVTAGVALMEAREAKRDISMLKEAIEKTQNSIEKLQNSAGEQILALKMLQDYVNGEIKPAIEELGCETAALKLGIALTQHYTELTNAFGSNLGSIGEKSLTLQALSSLYKTNITNILTATNLGKTDIYDIIYAEQVKGRVIDVDLKRYMVTISVKIPILSEIPGVLIYEVSSISYNIDGAEWYAAVPDHILSKSAYIGGADISDCIESRLTYICPQDPAQIIADNQQQCFFGHLDKCPITKVIDNLVPKFAFINGGVVANCIASTCTCGEERIQVSQDRNKGVTFLTHNNCGLIGINGIEFHANKKGSDATWNVSPIGVGPAVSLRPVDISLQIVAATNFLNSSRKDLMKAKEILNQVGNLKDLTTITIINIVIIIILLICVIGLGILYHQLRSALGMRDKMSVLNNSSYSLEPRTAQVQVIKPTSFMG

SEQ ID NO: 26 - protein, 538 aa, Avian metapneumovirus
  MISC_FEATURE: Protein F
MDVRICLLLFLISNPSSCIQETYNEESCSTVTRGYKSVLRTGWYTNVFNLEIGNVENITCNDGPSLIDTELVLTKNALRELKTVSADQVAKESRLSSPRRRRFVLGAIALGVATAAAVTAGVALAKTIRLEGEVKAIKNALRNTNEAVSTLGNGVRVLATAVNDLKEFISKKLTPAINQNKCNIADIKMAISFGQNNRRFLNVVRQFSDSAGITSAVSLDLMTDDELVRAINRMPTSSGQISLMLNNRAMVRRKGFGILIGVYDGTVVYMVQLPIFGVIETPCWRVVAAPLCRKRRGNYACILREDQGWYCTNAGSTAYYPNKDDCEVRDDYVFCDTAAGINVALEVDQCNYNISTSKYPCKVSTGRHPVSMVALTPLGGLVSCYESVSCSIGSNKVGIIKQLGKGCTHIPNNEADTITIDNTVYQLSKVVGEQRTIKGAPVVNNFNPILFPVDQFNVALDQVFESIDRSQDLIDKSNDLLGADAKSKAGIAIAIVVLVILGIFFLLAVIYYCSRVRKTKPKHDYPATTGHSSMAYVS

SEQ ID NO: 27 - protein, 545 aa, Avian paramyxovirus 13 goose/Kazakhstan
  MISC_FEATURE: fusion protein
MARFSWEIFRLSTILLIAQTCQGSIDGRLTLAAGIVPVGDRPISIYTSSQTGIIVVKLIPNLPDNKKDCAKQSLQSYNETLSRILTPLATAMSAIRGNSTTQVRENRLVGAIIGSVALGVATAAQITAATALIQANQNAANIARLANSIAKTNEAVTDLTEGLGTLAIGVGKLQDYVNEQFNNTAVAIDCLTLESRLGIQLSLYLTELMGVFGNQLTSPALTPITIQALYNLAGGNLNALLSRLGASETQLGSLINSGLIKGMPIMYDDANKLLAVQVELPSIGKLNGARSTLLETLAVDTTRGPSSPIIPSAVIEIGGAMEELDLSPCITTDLDMFCTKIISYPLSQSTLSCLNGNLSDCVFSRSEGVLSTPYMTIKGKIVANCKQVICRCMDPPQILSQNYGEALLLIDENTCRSLELSGVILKLAGTYESEYTRNLTVDPSQVIITGPLDISAELSKVNQSIDSAKENIAESNKFLSQVNVKLLSSSAMITYIVATVVCLIIAITGCVIGIYTLTKLKSQQKTLLWLGNNAEMHGSRSKTSF

SEQ ID NO: 28 - protein, 554 aa, Menangle virus
  MISC_FEATURE: fusion protein
MMPRVLGMIVLYLTHSQILCINRNTLYQIGLIHRSVKKVNFYSQGSPSYIVVKLVPTLAAIPPNCSIKSLQRYKETVTSLVQPISDNLGYLQDKLVTGQSRRRRRFAGVAIGLAALGVAAAAQATAAVALVETRENAGKIQALSESIQNTNQAVHSLKTALGFSATAIQAIQNQVNEVINPAINKLSCEVLDSQLASMLNLYLIHLTTVFQTQLTNPALTPLSIQALTSVLQGTSGVLMNSTNSTLTQPIDLLATGLITGQIISVNMTSLQLIIATFMPSIAELPNAVLHSFFRITTSVNLTEVMIQSPEFIMEQNGVFYDFNTAHCQLGDNNVYCPYIDAARLSSMMTNCINGNLGECVFSRVIGSFPSRFVSLNGAILANCKFMRCNCLSPEKIITPLDGEMISLIDLRVCQKLTLGTITFEISQPVNVSFQGGFVANAGQIIVTNPFDISAELGQINNSLNDAQGFLDQSNNWLKVSGWINNSGSLFIAGIVVIGLIVLCIVIIIYINVQIIREVNRLRSFIYRDYVLDHDKAPYSPESSSPHRKSLKTVS

SEQ ID NO: 29 - protein, 544 aa, Avian paramyxovirus 5
  MISC_FEATURE: fusion protein
MLQLPLTILLSILSAHQSLCLDNSKLIHAGIMSTTEREVNVYAQSITGSIVVRLIPNIPSNHKSCATSQIKLYNDTLTRLLTPIKANLEGLISAVSQDQSQNSGKRKKRFVGAVIGAAALGLATAAQVTATVALNQAQENARNILRLKNSIQKTNEAVMELKDAVGQTAVAIDKTQAFINNQILPAISNLSCEVLGNKIGVQLSLYLTELTTVFGNQLTNPALTTLSLQALYNLCGDDFNYLINLLNAKNRNLASLYEANLIQGRITQYDSMNQLLIIQVQIPSISTVSGMRVTELFTLSVDTPIGEGKALVPKYVLSSGRIMEEVDLSSCAITSTSVFCSSIISRPLPLETINCLNGNVTQCQFTANTGTLESRYAVIGGLVIANCKAIVCRCLNPPGVIAQNLGLPITIISSNTCQRINLEQITLSLGNSILSTYSANLSQVEMNLAPSNPLDISVELNRVNTSLSKVESLIKESNSILDSVNPQILNVKTVIILAVIIGLIVVWCFILTCLIVRGFMLLVKQQKFKGLSVQNNPYVSNNSH

SEQ ID NO: 30 - protein, 557 aa, Cedar virus
  MISC_FEATURE: fusion glycoprotein
MSNKRTTVLIIISYTLFYLNNAAIVGFDFDKLNKIGVVQGRVLNYKIKGDPMTKDLVLKFIPNIVNITECVREPLSRYNETVRRLLLPIHNMLGLYLNNTNAKMTGLMIAGVIMGGIAIGIATAAQITAGFALYEAKKNTENIQKLTDSIMKTQDSIDKLTDSVGTSILILNKLQTYINNQLVPNLELLSCRQNKIEFDLMLTKYLVDLMTVIGPNINNPVNKDMTIQSLSLLFDGNYDIMMSELGYTPQDFLDLIESKSITGQIIYVDMENLYVVIRTYLPTLIEVPDAQIYEFNKITMSSNGGEYLSTIPNFILIRGNYMSNIDVATCYMTKASVICNQDYSLPMSQNLRSCYQGETEYCPVEAVIASHSPRFALTNGVIFANCINTICRCQDNGKTITQNINQFVSMIDNSTCNDVMVDKFTIKVGKYMGRKDINNINIQIGPQIIIDKVDLSNEINKMNQSLKDSIFYLREAKRILDSVNISLISPSVQLFLIIISVLSFIILLIIIVYLYCKSKHSYKYNKFIDDPDYYNDYKRERINGKASKSNNIYYVGD

SEQ ID NO: 31 - protein, 546 aa, Rinderpest morbillivirus
  MISC_FEATURE: F protein
MGILFAALLAMTNPHLATGQIHWGNLSKIGVVGTGSASYKVMTQSSHQSLVIKLMPNVTAIDNCTKTEIMEYKRLLGTVLKPIREALNAITKNIKPIQSSTTSRRHKRFAGVVLAGAALGVATAAQITAGIALHQSMMNSQAIESLKASLETTNQAIEEIRQAGQEMVLAVQGVQDYINNELVPAMGQLSCEIVGQKLGLKLLRYYTEILSLFGPSLRDPVSAELSIQALSYALGGDINKILEKLGYSGSDLLAILESKGIKAKITYVDIESYFIVLSIAYPSLSEIKGVIVHRLESVSYNIGSQEWYTTVPRYVATQGYLISNFDDTPCAFTPEGTICSQNALYPMSPLLQECFRGSTRSCARTLVSGSIGNRFILSKGNLIANCASILCKCYTTGSIISQDPDKILTYIAADQCPVVEVGGVTIQVGSREYSDAVYLHEIDLGPPISLEKLDVGTNLWNAVTKLEKAKDLLDSSDLILENIKGVSVTNTGYILVGVGLIAVVGILIITCCCKKRRSDNKVSTMVLNPGLRPDLTGTSKSYVRSL

SEQ ID NO: 32 - protein, 536 aa, Avian paramyxovirus 10
  MISC_FEATURE: fusion protein
MTRTRLLFLLTCYIPGAVSLDNSILAPAGIISASERQIAIYTQTLQGTIALRFIPVLPQNLSSCAKDTLESYNSTVSNLLLPIAENLNALLKDADKPSQRIIGAIIGSVALGVATTAQVTAALAMTQAQQNARNIWKLKESIKNTNQAVLELKDGLQQSAIALDKVQSFINSEILPQINQLGCEVAANKLGIFLSLYLTEITTVFKNQITNPALSTLSYQALYNLCGGNMAALTKQIGIKDTEINSLYEAELITGQVIGYDSADQILLIQVSYPSVSRVQGVRAVELLTVSVATPKGEGKAIAPSFIAQSNIIAEELDTQPCKFSKTTLYCRQVNTRTLPVRVANCLKGKYNDCQYTTEIGALASRYVTITNGVVANCRSIICRCLDPEGIVAQNSDAAITVIDRSTCKLIQLGDITLRLEGKLSSSYSKNITIDISQVTTSGSLDISSELGSINNTITKVEDLISKSNDWLSKVNPTLISNDTIIALCVIAGIVVIWLVIITILSYYILIKLKNVALLSTMPKKDLNPYVNNTKF

SEQ ID NO: 33 - protein, 552 aa, Dolphin morbillivirus
  MISC_FEATURE: fusion protein
MAASNGGVMYQSFLTIIILVIMTEGQIHWGNLSKIGIVGTGSASYKVMTRPNHQYLVIKLMPNVTMIDNCTRTEVTEYRKLLKTVLEPVKNALTVITKNIKPIQSLTTSRRSKRFAGVVLAGVALGVATAAQITAGVALHQSIMNSQSIDNLRTSLEKSNQAIEEIRQASQETVLAVQGVQDFINNELIPSMHQLSCEMLGQKLGLKLLRYYTEILSIFGPSLRDPVSAEISIQALSYALGGDINKILEKLGYSGADLLAILESRGIKAKVTHVDLEGYFIVLSIAYPTLSEVKGVIVHKLEAVSYNLGSQEWYTTLPKYVATNGYLISNFDESSCAFMSEVTICSQNALYPMSPLLQQCLRGSTASCARSLVSGTIGNRFILSKGNLIANCASVLCKCYSTGTIISQDPDKLLTFVAADKCPLVEVDGITIQVGSREYPDSVYVSRIDLGPAISLEKLDVGTNLGSALTKLDNAKDLLDSSNQILENVRRSSFGGAMYIGILVCAGALVILCVLVYCCRRHCRKRVQTPPKATPGLKPDLTGTTKSYVRSL

SEQ ID NO: 34 - protein, 552 aa, Mossman virus
  MISC_FEATURE: fusion protein
MSNYFPARVIIIVSLITAVSCQISFQNLSTIGVFKFKEYDYRVSGDYNEQFLAIKMVPNVTGVENCTASLIDEYRHVIYNLLQPINTTLTASTSNVDPYAGNKKFFGAVIAGVALGVATAAQVTAGVALYEARQNAAAIAEIKESLHYTHKAIESLQISQKQTVVAIQGIQDQINTNIIPQINALTCEIANQRLRLMLLQYYTEMLSSFGPIIQDPLSGHITVQALSQAAGGNITGLMRELGYSSKDLRYILSVNGISANIIDADPEIGSIILRIRYPSMIKIPDVAVMELSYLAYHAAGGDWLTVGPRFILKRGYSLSNLDITSCTIGEDFLLCSKDVSSPMSLATQSCLRGDTQMCSRTAVQDREAPRFLLLQGNLIVNCMSVNCKCEDPEETITQDPAYPLMVLGSDTCKIHYIDGIRIKLGKVQLPPITVLNTLSLGPIVVLNPIDVSNQLSLVETTVKESEDHLKNAIGALRSQSRVGGVGIVAIVGLIIATVSLVVLVISGCCLVKYFSRTATLESSLTTIEHGPTLAPKSGPIIPTYINPVYRHD

SEQ ID NO: 35 - protein, 544 aa, J-virus
  MISC_FEATURE: fusion protein
MKPVALIYLTILAFTVKVRSQLALSDLTKIGIIPAKSYELKISTQAAQQLMVIKLIPNVNGLTNCTIPVMDSYKKMLDRILKPIDDALNHVKNAIQDKQGDGVPGVRFWGAIIGGVALGVATSAQITAGVALHNSIQNANAILQLKESIRNSNKAIEELQAGLQSTVLVINALQDQINSQLVPAINTLGCSVIANTLGLRLNQYFSEISLVFGPNLRDPTSQTLSIQAIAKAFNGDFDSMMKKMHYTDSDFLDLLESDSIRGRIISVSLEDYLIIIQIDYPGLTTIPNSVVQTFNLITYNYKGTEWESIFPRELLIRGSYISNIDISQCVGTSKSMICKSDTSTTISPATWACATGNLTSCARTRVVNSHSTRFALSGGVLFANCAPIACRCQDPQYSINQEPKTTNVMVTSEDCKELYIDGFYLTLGKKMLDRAMYAEDVALGGSVSVDPIDIGNELNSINESINKSHEYLDKANELLEQVNPNIVNVSSFSFILVISILLIIWFIVTLVWLIYLTKHMNFIVGKVAMGSRSSTVNSLSGFVG

SEQ ID NO: 36 - protein, 537 aa, Mapuera virus
  MISC_FEATURE: fusion protein
MRSSLFLVLTLLVPFAHSIDSITLEQYGTVITSVRSLAYFLETNPTYISVRLMPAIQTDSSHCSYHSIENYNLTLTKLLLPLQENLHQITDSLSSRRRKKRFAGVAVGLAALGVATAAQVTAAIAVVKAKENSAKIAQLTSAISETNRAVQDLIEGSKQLAVAVQAIQDQINNVIQPQLTNLSCQVADAQVGTILNMYLTELTTVFHPQITNSALTPITIQALRSLLGSTLPQVVTSTIKTDVPLQDLLTSGLLKGQIVYLDLQSMIMVVSVSVPTIALHSMAKVYTLKAISAHVNNAEVQMQVPSRVMELGSEIMGYDIDQCEETSRYLFCPYNGGSILSATMKMCLNGNISQCVFTPIYGSFLQRFVLVDGVIVANCRDMTCACKSPSKIITQPDSLPVTIIDSTSCSNLVLDTLELPIISINNATYRPVQYVGPNQIIFSQPLDLLSQLGKINSSLSDAIEHLAKSDEILEQIQWDSPQGYTLIALTSVLAFVVVAIVGLLISTRYLIFEIRRINTTLTQQLSSYVLSNKIIQY

SEQ ID NO: 37 - protein, 566 aa, Nariva virus
  MISC_FEATURE: fusion protein
MAEQEKTPLRYKILLIIIVINHYNITNVFGQIHLANLSSIGVFVTKTLDYRTTSDPTEQLLVINMLPNISNIQDCAQGVVNEYKHLISSLLTPINDTLDLITSNINPYSGRNKLFGEIIAGAALTVATSAQITAGVALYEARQNAKDIAAIKESLGYAYKAIDKLTTATREITVVINELQDQINNRLIPRINDLACEVWATRLQAMLLQYYAEIFSVIGPNLQDPLSGKISIQALARAAGGNIKLMVDELNYSGQDLSRLVKVGAIKGQIIDADPSLGVVIIKMRYPNIIKIPNVAISELSYVSYSSDGQDWITTGPNYIVTRGYSIANIQTSSCSVGDDFVLCDRDMTYPMSQVTQDCLRGNIALCSRMVVRDREAPRYLILQGNMVANCMSITCRCEEPESEIYQSPDQPLTLLTRDTCDTHVVDGIRIRLGVRKLPTISVINNITLGPIITTDPIDVSNQLNAVVSTIDQSAELLHQAQRVLSERARGARDHILATAAIVICVVLAVLILVLLIGLVYLYRTQNEILVKTTMLEQVPTFAPKSFPMESQIYSGKTNKGYDPAE

SEQ ID NO: 38 - protein, 662 aa, Bat Paramyxovirus
  MISC_FEATURE: fusion protein
MKKKTDNPTISKRGHNHSRGIKSRALLRETDNYSNGLIVENLVRNCHHPSKNNLNYTKTQKRDSTIPYRVEERKGHYPKIKHLIDKSYKHIKRGKRRNGHNGNIITIILLLILILKTQMSEGAIHYETLSKIGLIKGITREYKVKGTPSSKDIVIKLIPNVTGLNKCTNISMENYKEQLDKILIPINNIIELYANSTKSAPGNARFAGVIIAGVALGVAAAAQITAGIALHEARQNAERINLLKDSISATNNAVAELQEATGGIVNVITGMQDYINTNLVPQIDKLQCSQIKTALDISLSQYYSEILTVFGPNLQNPVTTSMSIQAISQSFGGNIDLLLNLLGYTANDLLDLLESKSITGQITYINLEHYFMVIRVYYPIMTTISNAYVQELIKISFNVDGSEWVSLVPSYILIRNSYLSNIDISECLITKNSVICRHDFAMPMSYTLKECLTGDTEKCPREAVVTSYVPRFAISGGVIYANCLSTTCQCYQTGKVIAQDGSQTLMMIDNQTCSIVRIEEILISTGKYLGSQEYNTMHVSVGNPVFTDKLDITSQISNINQSIEQSKFYLDKSKAILDKINLNLIGSVPISILFIIAILSLILSIITFVIVMIIVRRYNKYTPLINSDPSSRRSTIQDVYIIPNPGEHSIRSAARSIDRDRD

SEQ ID NO: 39 - protein, 539 aa, Avian paramyxovirus 7
  MISC_FEATURE: fusion protein
MRVRPLIIILVLLVLLWLNILPVIGLDNSKIAQAGIISAQEYAVNVYSQSNEAYIALRTVPYIPPHNLSCFQDLINTYNTTIQNIFSPIQDQITSITSASTLPSSRFAGLVVGAIALGVATSAQITAAVALTKAQQNAQEIIRLRDSIQNTINAVNDITVGLSSIGVALSKVQNYLNDVINPALQNLSCQVSALNLGIQLNLYLTEITTIFGPQITNPSLTPLSIQALYTLAGDNLMQFLTRYGYGETSVSSILESGLISAQIVSFDKQTGIAILYVTLPSIATLSGSRVTKLMSVSVQTGVGEGSAIVPSYVIQQGTVIEEFIPDSCIFTRSDVYCTQLYSKLLPDSILQCLQGSMADCQFTRSLGSFANRFMTVAGGVIANCQTVLCRCYNPVMIIPQNNGIAVTLIDGSLCKELELEGIRLTMADPVFASYSRDLIINGNQFAPSDALDISSELGQLNNSISSATDNLQKAQESLNKSIIPAATSSWLIILLFVLVSISLVIGCISIYFIYKHSTTNRSRNLSSDIISNPYIQKAN

SEQ ID NO: 40 - protein, 539 aa, Tuhoko virus 2
  MISC_FEATURE: fusion protein
MAPCVLFLSSLLLISTISPSHGINQPALRRIGAIVSSVKQLKFYSKTKPNYIIVKLLPTINLSKSNCNLTSINRYKESVIEIIKPLADNIDNLNQKLLPKNRRKRMAGVAIGLAALGVAAAAQATAAVALVEARKNTQMIQSLADSIQDTNAAVQAVNIGLQNSAVAIQAIQNQINNVINPALDRLNCEVLDAQIASILNLYLIKSVTIFQNQLTNPALQQLSIQMLSIVMQDTAKILGNFTIGDKFDQHDLLGSGLITGQVVGVNLTNLQLIIAAFIPSIAPLPQAYIIDLISITISVNDTEAVIQIPERIMEHGSSIYQFGGKQCVYGQFSAYCPFSDAVLMTQDLQLCMKGNIEHCIFSSVLGSFPNRFASVDGVFYANCKYMSCACSDPLQVIHQDDSVNLMVIDSSVCRSLTLGHVTFPIIAFSNVSYQMKTNISIEQMIVTSPLDLSTELKQINNSVNIANTFLDSSNRALKTSIFGTSSQIILIVLLIFTCLLILYVIFLTYIIKILIKEVKRLRDGNSRTGSKLSFINPDV

SEQ ID NO: 41 - protein, 537 aa, Tuhoko virus 3
  MISC_FEATURE: fusion protein
MLWLTILIALVGNHESTCMNINFLQSLGQINSQKRFLNFYTQQPPSYMVIRLVPTLQLSANNCTLGSIVRYRNAIKELIQPMDENLRWLSSNLIPQRRGKRFAGVAVGLAALGVAVAAQATAAVALVEARANAEKIASMSQSIQETNKAVTSLSQAVSASGIAIQAIQNEINNVIHPILNQVQCDVLDARVGNILNLYLIKVTTIFQNQLTNPALQRLSTQALSMLMQSTSSYLRNLSSSESAINADLSMTNLIEAQIVGINMTNLQLVLAVFIPSIARLNGALLYDFISITISSNQTEVMLQIPHRVLEIGNSLYTFEGTQCEMTKLNAYCLYSDAIPVTESLRDCMNGLFSQCGFVRIIGSFANRFASVNGVIYANCKHLTCSCLQPDEIITQDTNVPLTIIDTKRCTKISLGHLTFTIREYANVTYSLRTEIANSQITVVSPLDLSSQLTTINNSLADATNHIMNSDRILDRLNSGLYSKWVIIFLICASIVSLIGLVFLGFLIRGLILELRSKHRSNLNKASTYSIDSSIGLT

SEQ ID NO: 42 - protein, 545 aa, Mojiang virus
  MISC_FEATURE: fusion protein
MALNKNMFSSLFLGYLLVYATTVQSSIHYDSLSKVGVIKGLTYNYKIKGSPSTKLMVVKLIPNIDSVKNCTQKQYDEYKNLVRKALEPVKMAIDTMLNNVKSGNNKYRFAGAIMAGVALGVATAATVTAGIALHRSNENAQAIANMKSAIQNTNEAVKQLQLANKQTLAVIDTIRGEINNNIIPVINQLSCDTIGLSVGIRLTQYYSEIITAFGPALQNPVNTRITIQAISSVFNGNFDELLKIMGYTSGDLYEILHSELIRGNIIDVDVDAGYIALEIEFPNLTLVPNAVVQELMPISYNIDGDEWVTLVPRFVLTRTTLLSNIDTSRCTITDSSVICDNDYALPMSHELIGCLQGDTSKCAREKVVSSYVPKFALSDGLVYANCLNTICRCMDTDTPISQSLGATVSLLDNKRCSVYQVGDVLISVGSYLGDGEYNADNVELGPPIVIDKIDIGNQLAGINQTLQEAEDYIEKSEEFLKGVNPSIITLGSMVVLYIFMILIAIVSVIALVLSIKLTVKGNVVRQQFTYTQHVPSMENINYVSH

SEQ ID NO: 43 - protein, 546 aa, Avian paramyxovirus 12
  MISC_FEATURE: fusion protein
MAIPVPSSTALMIFNILVSLAPASALDGRLLLGAGIVPTGDRQVNVYTSSQTGIIALKLLPNLPKDKENCAEVSIRSYNETLTRILTPLAQSMAAIRGNSTVSTRGREPRLVGAIIGGVALGVATAAQITAATALIQANQNAENIARLAKGLAATNEAVTDLTKGVGSLAIGVGKLQDYVNEQFNRTGEAIECLTIESRVGVQLSLYLTEVIGVFGDQITSPALSDISIQALYNLAGGNLNVLLQKMGIEGTQLGSLINSGLIKGRPIMYDDGNKILGIQVTLPSVGRINGARATLLEAIAVATPKGNASPLIPRAVISVGSLVEELDMTPCVLTPTDIFCTRILSYPLSDSLTTCLKGNLSSCVFSRTEGALSTPYVSVHGKIVANCKSVVCRCVEPQQIISQNYGEALSLIDESLCRILELNGVILKMDGQFTSEYTKNITIDPVQVIISGPIDISSELSQVNQSLDSALENIKESNSYLSKVNVKLISSSAMITYIVITVICLILTFVALVLGIYSYTKIRSQQKTLIWMGNNIARSKEGNRF

SEQ ID NO: 44 - protein, 538 aa, Avian paramyxovirus 3
  MISC_FEATURE: Fusion protein
  misc_feature (287)..(287): Xaa can be any naturally occurring amino acid
MASPMVPLLIITVVPALISSQSANIDKLIQAGIIMGSGKELHIYQESGSLDLYLRLLPVIPSNLSHCQSEVITQYNSTVTRLLSPIAKNLNHLLQPRPSGRLFGAVIGSIALGVATSAQISAAIALVRAQQNANDILALKAAIQSSNEAIKQLTYGQEKQLLAISKIQKAVNEQVIPALTALDCAVLGNKLAAQLNLYLIEMTTIFGDQINNPVLTPIPLSYLLRLTGSELNDVLLQQTRSSLSLIHLVSKGLLSGQIIGYDPSVQGIIIRIGLIRTQRIDRSLVFXPYVLPITISSNIATPIIPDCVVKKGVIIEGMLKSNCIELERDIICKTINTYQITKETRACLQGNITMCKYQQSRTQLSTPFITYNGVVIANCDLVSCRCIRPPMIITQVKGYPLTIINRNLCTELSVDNLILNIETNHNFSLNPTIIDSQSRLIATSPLEIDALIQDAQHHAAAALLKVEESNAHLLRVTGLGSSSWHIILILTLLVCTIAWLIGLSIYVCRIKNDDSTDKEPTTQSSNRGIGVGSIQYMT

SEQ ID NO: 45 - protein, 552 aa, Salem virus
  MISC_FEATURE: fusion protein
MNPLNQTLIAKVLGFLLLSSSFTVGQIGFENLTRIGVHQVKQYGYKLAHYNSHQLLLIRMIPTVNGTHNCTHQVITRYREMVREIITPIKGALDIMKKAVSPDLVGARIFGAIVAGAALGIATSAQITAGVALHRTKLNGQEISKLKEAVSLTNEAVEQLQYSQGKSILAIQGIQDFINFNVVPLLEEHTCGIAKLHLEMALMEYFQKLILVFGPNLRDPIGSTIGIQALATLFQNNMFEVSLRLGYAGDDLEDVLQSNSIRANIIEAEPDSGFIVLAIRYPTLTLVEDQVITELAHITFNDGPQEWVATIPQFVTYRGLVLANIDVSTCTFTERNVICARDQTYPMIIDLQLCMRGNIAKCGRTRVTGSTASRFLLKDGNMYANCIATMCRCMSSSSIINQEPSHLTTLIVKETCSEVMIDTIRITLGERKHPPIDYQTTITLGQPIALAPLDVGTELANAVSYLNKSKVLLEHSNEVLSSVSTAHTSLTATIVLGIVVGGLAILIVVMFLFLEAQVIKVQRAMMLCPITNHGYLPNEDLLTRGHSIPTIG

SEQ ID NO: 46 - protein, 551 aa, Avian paramyxovirus 9
  MISC_FEATURE: fusion protein
MGYFHLLLILTAIAISAHLCYTTTLDGRKLLGAGIVITEEKQVRVYTAAQSGTIVLRSFRVVSLDRYSCMESTIESYNKTVYNILAPLGDAIRRIQASGVSVERIREGRIFGAILGGVALGVATAAQITAAIALIQANENAKNILRIKDSITKTNEAVRDVTNGVSQLTIAVGKLQDFVNKEFNKTTEAINCVQAAQQLGVELSLYLTEITTVFGPQITSPALSKLTIQALYNLAGVSLDVLLGRLGADNSQLSSLVSSGLITGQPILYDSESQILALQVSLPSISDLRGVRATYLDTLAVNTAAGLASAMIPKVVIQSNNIVEELDTTACIAAEADLYCTRITTFPIASAVSACILGDVSQCLYSKTNGVLTTPYVAVKGKIVANCKHVTCRCVDPTSIISQNYGEAATLIDDQLCKVINLDGVSIQLSGTFESTYVRNVSISANKVIVSSSIDISNELENVNSSLSSALEKLDESDAALSKVNVHLTSTSAMATYIVLTVIALILGFVGLGLGCFAMIKVKSQAKTLLWLGAHADRSYILQSKPAQSST

SEQ ID NO: 47 - protein, 533 aa, Achimota virus 1
  MISC_FEATURE: fusion protein
MWIMIILSLFQIIPGVTPINSKVLTQLGVITKHTRQLKFYSHSTPSYLVVKLVPTINTESTVCNFTSLSRYKDSVRELITPLAKNIDNLNSILTIPKRRKRMAGVVIGLAALGVAAAAQATAAVALIEAKKNTEQIQALSESIQNTNKAVSSIEKGLSSAAIAVQAIQNQINNVINPALTALDCGVTDAQLGNILNLYLIKTLTVFQKQITNPALQPLSIQALNIIMQETSSVLRNFTKTDEIEHTDLLTSGLITGQVVGVNLTNLQLIIAAFIPSIAPLNQAYILDFIRITVNINNSESMIQIPERIMEHGISLYQFGGDQCTFSDWSAYCPYSDATLMAPGLQNCFRGQAADCVFSTVMGSFPNRFVSVQGVFYVNCKFIRCACTQPQRLITQDDSLSLTQIDAKTCRMLTLGFVQFSINEYANVTYSFKNNVTAGQLIMTNPIDLSTEIKQMNDSVDEAARYIEKSNAALNKLMYGGRSDIVTTVLLVGFILLVVYVIFVTYILKILMKEVARLRNSNHPDLIKPYNYPM

SEQ ID NO: 48 - protein, 531 aa, Achimota virus 2
  MISC_FEATURE: fusion protein
MLNSFYQIICLAVCLTTYTVISIDQHNLLKAGVIVKSIKGLNFYSRGQANYIIVKLIPNVNVTDTDCDIGSIKRYNETVYSLIKPLADNIDYLRTQFAPTKRKKRFAGVAIGLTALGVATAAQVTAAVALVKAQENARKLDALADSIQATNEAVQDLSTGLQAGAIAIQAIQSEINHVINPALERLSCEIIDTRVASILNLYLIRLTTVFHRQLVNPALTPLSIQALNHLLQGETEGLVKNESKMTDSKIDLLMSGLITGQVVGVNIKHMQLMIAVFVPTTAQLPNAYVINLLTITANINNSEVLVQLPNQILERSGIIYQFRGKDCVSSPNHMYCPYSDASILSPELQLCLQGRLEMCLFTQVVGSFPTRFASDKGIVYANCRHLQCACSEPEGIIYQDDTSAITQIDASKCSTLKLDMLTFKLSTYANKTFDASFSVGKDQMLVTNLLDLSAELKTMNASVAHANKLIDKSNLLIQSNALIGHSNTIFIVVIVILAVMVLYLIIVTYIIKVIMVEVSRLKRMNIYSIDK

SEQ ID NO: 49 - protein, 532 aa, Tuhoko virus 1
  MISC_FEATURE: fusion protein
MVTIIKPLILLVTVILQISGHIDTTALTSIGAVIASSKEIMYYAQSTPNYIVIKLIPNLPNIPSQCNFSSIAYYNKTLLDLFTPISDNINMLHQRLSNTGRNRRFAGVAIGLAALGVATAAQVTAAFALVEAKSNTAKIAQIGQAIQNTNAAINSLNAGIGGAVTAIQAIQTQINGIITDQINAATCTALDAQIGTLLNMYLLQLTTTFQPQIQNPALQPLSIQALHRIMQGTSIVLSNLTDSSKYGLNDALSAGLITGQIVSVDLRLMQITIAANVPTLSRLENAIAHDIMRITTNVNNTEVIVQLPETIMEHAGRLYQFNKDHCLSSTQRFFCPYSDAKLLTSKISSCLSGIRGDCIFSPVVGNFATRFISVKGVIIANCKFIRCTCLQPEGIISQLDDHTLTVIDLKLCNKLDLGLIQFDLQVLSNISYEMTLNTSQNQLILTDPLDLSSELQTMNQSINNAANFIEKSNSLLNSSTYEFNRSVALLVALILLSLTILYVIVLTCVVKLLVHEVSKNRRHIQDLESHHK

SEQ ID NO: 50 - protein, 631 aa, Phocine distemper virus
  MISC_FEATURE: fusion protein
MTRVKKLPVPTNPPMHHSLDSPFLNPEHATGKISITDDTSSQLTNFLYHKYHKTTINHLSRTISGTDPPSAKLNKFGSPILSTYQIRSALWWIAMVILVHCVMGQIHWTNLSTIGIIGTDSSHYKIMTRSSHQYLVLKLMPNVSIIDNCTKAELDEYEKLLNSVLEPINQALTLMTKNVKSLQSLGSGRRQRRFAGVVIAGAALGVATAAQITAGVALYQSNLNAQAIQSLRASLEQSNKAIDEVRQASQNIIIAVQGVQDYVNNEIVPALQHMSCELIGQRLGLKLLRYYTELLSVFGPSLRDPVSAEISIQALSYALGGEIHKILEKLGYSGNDMVAILETKGIRAKITHVDLSGKFIVLSISYPTLSEVKGVVVHRLEAVSYNIGSQEWYTTVPRYVATNGYLISNFDESSCVFVSESAICSQNSLYPMSPILQQCLRGETASCARTLVSGTLGNKFILSKGNIIANCASILCKCHSTSKIINQSPDKLLTFIASDTCSLVEIDGVTIQVGSRQYPDVVYASKVILGPAISLERLDVGTNLGSALKKLNDAKVLIESSDQILDTVKNSYLSLGTLIALPVSIGLGLILLLLICCCKKRYQHLFSQSTKVAPVFKPDLTGTSKSYVRSL

SEQ ID NO: 51 - protein, 541 aa, Caprine parainfluenza virus 3
  MISC_FEATURE: fusion protein
MIKKIICIFSMPILLSFCQVDIIKLQRVGILVSKPKSIKISQNFETRYLVLNLIPNIENAQSCGDQQIKQYKKLLDRLIIPLYDGLRLQQDIIVVDNNLKNNTNHRAKRFFGEIIGTIALGVATSAQITAAVALVEAKQARSDIERVKNAVRDTNKAVQSIQGSVGNLIVAVKSVQDYVNNEIVPSIKRLGCEAAGLQLGIALTQHYSELTNIFGDNIGTLKEKGIKLQGIASLYHTNITEIFTTSTVDQYDIYDLLFTESIKMRVIDVDLNDYSITLQVRLPLLTKISDAQIYNVDSVSYNIGGTEWYIPLPRNIMTKGAFLGGANLQDCIESFSDYICPSDPGFILNRDIENCLSGNITQCPKTLVISDIVPRYAFVDGGVIANCLSTTCTCNGIDNRINQAPDQGIKIITYKDCQTIGINGMLFKTNQEGTLAAYTPVDITLNNSVNLDPIDLSIELNRARSDLAESKEWIKRSEAKLDSVGSWYQSSTTEIIQIVMIIVLFIINIIVLIVLIKYSRSQNQSMNNHMNEPYILTNKVQ

SEQ ID NO: 52 - protein, 553 aa, Tupaia paramyxovirus
  MISC_FEATURE: fusion protein
MASLLKTICYIYLITYAKLEPTPKSQLDLDSLASIGVVDAGKYNYKLMTTGSEKLMVIKLVPNITYATNCNLTAHTAYTKMIERLLTPINQSLYEMRSVITERDGGTIFWGAIIAGAALGVATAAAITAGVALHRAEQNARNIAALKDALRNSNEAIQHLKDAQGHTVLAIQGLQEQINNNIIPKLKESHCLGVNNQLGLLLNQYYSEILTVFGPNLQNPVSASLTIQAIAKAFNGDFNSLMTNLNYDPTDLLDILESNSINGRIIDVNLNEKYIALSIEIPNFITLTDAKIQTFNRITYGYGSNEWLTLIPDNILEYGNLISNVDLTSCVKTKSSYICNQDTSYPISSELTRCLRGDTSSCPRTPVVNSRAPTFALSGGHIYANCAKAACRCEKPPMAIVQPATSTLTFLTEKECQEVVIDQINIQLAPNRLNKTIITDGIDLGPEVIINPIDVSAELGNIELEMDKTQKALDRSNKILDSMITEVTPDKLLIAMIVVFGILLLWLFGVSYYAFKIWSKLHFLDSYVYSLRNPSHHRSNGHQNHSFSTDISG

SEQ ID NO: 53 - protein, 543 aa, Avian paramyxovirus 3
  MISC_FEATURE: fusion protein
MQPGSALHLPHLYIIIALVSDGTLGQTAKIDRLIQAGIVLGSGKELHISQDSGTLDLFVRLLPVLPSNLSHCQLEAITQYNKTVTRLLAPIGKNLEQVLQARPRGRLFGPIIGSIALGVATSAQITAAIALVRAQQNANDILALKNALQSSNEAIRQLTYGQDKQLLAISKIQKAVNEQILPALDQLDCAVLGTKLAVQLNLYLIEMTTIFGEQINNPVLATIPLSYILRLTGAELNNVLMKQARSSLSLVQLVSKGLLSGQVIGYDPSVQGLIIRVNLMRTQKIDRALVYQPYVLPITLNSNIVTPIAPECVIQKGTIIEGMSRKDCTELEQDIICRTVTTYTLARDTRLCLQGNISSCRYQQSGTQLHTPFITYNGAVIANCDLVSCRCLRPPMIITQVKGYPLTIITRSVCQELSVDNLVLNIETHHNFSLNPTIIDPLTRVIATTPLEIDSLIQEAQDHANAALAKVEESDKYLRAVTGGNYSNWYIVLVIVLLFGNLGWSLLLTVLLCRSRKQQRRYQQDDSVGSERGVGVGTIQYMS

SEQ ID NO: 54 - protein, 541 aa, Avian paramyxovirus 14
  MISC_FEATURE: fusion protein
MEKGTVLFLAALTLYNVKALDNTKLLGAGIASGKEHELKIYQSSVNGYIAVKLIPFLPSTKRECYNEQLKNYNATINRLMGPINDNIKLVLSGVKTRTREGKLIGAIIGTAALGLATAAQVTAAIALEQAQDNARAILTLKESIRNTNNAVSELKTGLSEVSIALSKTQDYINTQIMPALSNLSCEIVGLKIGIQLSQYLTEVTAVFGNQITNPALQPLSMQALYQLCGGDFSLLLDKIGADRNELESLYEANLVTGRIVQYDTADQLVIIQVSIPSVSTLSGYRVTELQSISVDMDHGEGKAVIPRYIVTSGRVIEEMDISPCVLTATAVYCNRLLTTSLPESVLKCLDGDHSSCTYTSNSGVLETRYIAFDGMLIANCRSIVCKCLDPPYIIPQNKGKPLTIISKEVCKKVTLDGITLLIDAEFTGEYGLNITIGPDQFAPSGALDISTELGKLNNSINKAEDYIDKSNELLNRVNVDIVNDTAVIVLCVMSALVVVWCIGLTVGLIYVSKNTLRAVAIKGTSIENPYVSSGKHAKNSS

SEQ ID NO: 55 - protein, 551 aa, Avian paramyxovirus UPO216
  MISC_FEATURE: fusion protein
MIFTMYHVTVLLLLSLLTLPLGIQLARASIDGRQLAAAGIVVTGEKAINLYTSSQTGTIVVKLLPNVPQGREACMRDPLTSYNKTLTSLLSPLGEAIRRIHESTTETAGLVQARLVGAIIGSVALGVATSAQITAAAALIQANKNAENILKLKQSIAATNEAVHEVTDGLSQLAVAVGKMQDFINTQFNNTAQEIDCIRISQQLGVELNLYLTELTTVFGPQITSPALSPLSIQALYNLAGGNLDVLLSKIGVGNNQLSALISSGLISGSPILYDSQTQLLGIQVTLPSVSSLNNMRAIFLETLSVSTDKGFAAALIPKVVTTVGTVTEELDTSYCIETDIDLFCTRIVTFPMSPGIYACLNGNTSECMYSKTQGALTTPYMSVKGSIVANCKMTTCRCADPASIISQNYGEAVSLIDSSVCRVITLDGVTLRLSGSFDSTYQKNITIRDSQVIITGSLDISTELGNVNNSINNALDKIEESNQILESVNVSLTSTNALIVYIICTALALICGITGLILSCYIMYKMRSQQKTLMWLGNNTLDQMRAQTKM

SEQ ID NO: 56 - protein, 552 aa, Atlantic salmon paramyxovirus
  MISC_FEATURE: fusion protein
MDGPKFRFVLLILLTAPARGQVDYDKLLKVGIFEKGTANLKISVSSQQRYMVIKMMPNLGPMNQCGIKEVNLYKESILRLITPISTTLNYIKSEIQVEREVALQPNGTIVRFFGLIVAAGALTLATSAQITAGIALHNSLENAKAIKGLTDAIKESNLAIQKIQDATAGTVIALNALQDQVNTNIIPAINTLGCTAAGNTLGIALTRYYSELIMIFGPSLGNPVEAPLTIQALAGAFNGDLHGMIREYGYTPSDIEDILRTNSVTGRVIDVDLVGMNIVLEINLPTLYTLRDTKIVNLGKITYNVDGSEWQTLVPEWLAIRNTLMGGVDLSRCVVSSRDLICKQDPVFSLDTSIISCLNGNTESCPRNRVVNSVAPRYAVIRGNILANCISTTCLCGDPGVPIIQKGDNTLTAMSINDCKLVGVDGYVFRPGPKAVNVTFNLPHLNLGPEVNVNPVDISGALGKVEQDLASSRDHLAKSEKILSGINPNIINTEMVLVAVILSLVCAMVVIGIVCWLSILTKWVRSCRADCRRPNKGPDLGPIMSSQDNLSF

SEQ ID NO: 57 - protein, 546 aa, Nipah virus
  MISC_FEATURE: Fusion glycoprotein
MVVILDKRCYCNLLILILMISECSVGILHYEKLSKIGLVKGVTRKYKIKSNPLTKDIVIKMIPNVSNMSQCTGSVMENYKTRLNGILTPIKGALEIYKNNTHDLVGDVRLAGVIMAGVAIGIATAAQITAGVALYEAMKNADNINKLKSSIESTNEAVVKLQETAEKTVYVLTALQDYINTNLVPTIDKISCKQTELSLDLALSKYLSDLLFVFGPNLQDPVSNSMTIQAISQAFGGNYETLLRTLGYATEDFDDLLESDSITGQIIYVDLSSYYIIVRVYFPILTEIQQAYIQELLPVSFNNDNSEWISIVPNFILVRNTLISNIEIGFCLITKRSVICNQDYATPMTNNMRECLTGSTEKCPRELVVSSHVPRFALSNGVLFANCISVTCQCQTTGRAISQSGEQTLLMIDNTTCPTAVLGNVIISLGKYLGSVNYNSEGIAIGPPVFTDKVDISSQISSMNQSLQQSKDYIKEAQRLLDTVNPSLISMLSMIILYVLSIASLCIGLITFISFIIVEKKRNTYSRLEDRRVRPTSSGDLYYIGT

SEQ ID NO: 58 - protein, 321 aa, Human respiratory syncytial virus
  MISC_FEATURE: attachment glycoprotein
MSKTKDQRTAKTLERTWDTLNHLLFISSCLYKLNLKSIAQITLSILAMIISTSLIIAAIIFIASANHKVTLTTAIIQDATNQIKNTTPTYLTQNPQLGISFSNLSGTTLQSTTILASTTPSAESTPQSTTVKIINTTTTQILPSKPTTKQRQNKPQNKPNNDFHFEVFNFVPCSICSNNPTCWAICKRIPNKKPGKKTTTKPTKKPTLKTTKKDPKPQTTKPKEALTTKPTGKPTINTTKTNIRTTLLTSNTKGNPEHTSQEETLHSTTSEGYLSPSQVYTTSGQEETLHSTTSEGYLSPSQVYTTSEYLSQSLSSSNTTK

SEQ ID NO: 59 - protein, 616 aa, Newcastle disease virus
  MISC_FEATURE: hemagglutinin-neuraminidase protein
MERGVSQVALENDEREAKNTWRLVFRVTVLFLTIVTLAISAAALAFSMNASTPQDLEGIPVAISKVEDKITSALGASQDVMDRIYKQVALESPLALLNTESTIMNALTSLSYQINGAANASGCGAPVPDPDYIGGIGKELIVDDTSDVTSFYPSAFQEHLNFIPAPTTGSGCTRIPSFDMSATHYCYTHNVILSGCRDHSHSHQYLALGVLRTSATGRVFFSTLRSINLDDTQNRKSCSVSATPLGCDMLCSKVTETEEEDYQSTDPTLMVHGRLGFDGQYHERDLDVHTLFGDWVANYPGVGGGSFINNRVWFPVYGGLKPGSPTDKRQEGQYAIYKRYNDTCPDDQEYQVRMAKSAYKPNRFGGKRVQQAILSIGVSTTLADDPVLTVTSNTITLMGAEGRVMTVGTSHYLYQRGSSYYSPAILYPLTIANKTATLQDPYKFNAFTRPGSVPCQASARCPNSCVTGVYTDPYPIVFHKNHTLRGVFGTMLDDEQARLNPVSAVFDSIARSRVTRVSSSSTKAAYTTSTCFKVVKTGKVYCLSIAEISNTLFGEFRIVPLLVEILRDEGRSEARSALTTQGHPGWNDEVVDPIFCAVTNQTDHRQKLEEYAQSWP

SEQ ID NO: 60 - protein, 316 aa, Human respiratory syncytial virus
  MISC_FEATURE: receptor-binding glycoprotein
MSKNKNQRTARTLEKTWDTLNHLIVISSCLYKLNLKSIAQIALSVLAMIISTSLIIAAIIFIISANHKVTLTTVTVQTIKNHTEKNITTYLTQVSPERVSPSKQPTTTPPIHTNSATISPNTKSETHHTTAQTKGRTTTPTQNNKPSTKPRPKNPPKKPKDDYHFEVFNFVPCSICGNNQLCKSICKTIPNNKPKKKPTTKPTNKPPTKTTNKRDPKTPAKTLKKETTINPTTKKPTPKTTERDTSTPQSTVLDTTTSKHTERDTSTPQSTVLDTTTSKHTIQQQSLHSITPENTPNSTQTPTASEPSTSNSTQKL

SEQ ID NO: 61 - protein, 621 aa, Measles virus
  MISC_FEATURE: Hemagglutinin
MSPHRDRINAFYRDNPHPKGSRIVINREHLMIDRPYVLLAVLFVMFLSLIGLLAIAGIRLHRAAIYTAEIHKSLSTNLDVTNSIEHQVKDVLTPLFKIIGDEVGLRTPQRFTDLVKFISDKIKFLNPDREYDFRDLTWCINPPERIKLDYDQYCADVAAEELMNALVNSTLLEARATNQFLAVSKGNCSGPTTIRGQFSNMSLSLLDLYLSRGYNVSSIVTMTSQGMYGGTYLVGKPNLSSKGSELSQLSMHRVFEVGVIRNPGLGAPVFHMTNYFEQPVSNDFSNCMVALGELRFAALCHREDSVTVPYQGSGKGVSFQLVKLGVWKSPTDMQSWVPLSTDDPVIDRLYLSSHRGVIADNQAKWAVPTTRTDDKLRMETCFQQACKGKNQALCENPEWAPLKDNRIPSYGVLSVNLSLTVELKIKIASGFGPLITHGSGMDLYKTNHDNVYWLTIPPMKNLALGVINTLEWIPRFKVSPNLFTVPIKEAGEDCHAPTYLPAEVDGDVKLSSNLVILPGQDLQYVLATYDTSRVEHAVVYYVYSPSRSFSYFYPFRLPIKGVPIELQVECFTWDQKLWCRHFCVLADSESGGHITHSGMVGMGVSCTVTREDGTNRRQGCQ

SEQ ID NO: 62 - protein, 582 aa, Mumps virus
  MISC_FEATURE: hemagglutinin-neuraminidase
MEPSKLFTMSDNATFAPGPVINAADKKTFRTCFRILVLSVQAVTLILVIVTLGELVRMINDQGLSNQLSSIADKIRESATMIASAVGVMNQVIHGVTVSLPLQIEGNQNQLLSTLATICTGKKQVSNCSTNIPLVNDLRFINGINKFIIEDYATHDFSIGHPLNMPSFIPTATSPNGCTRIPSFSLGKTHWCYTHNVINANCKDHTSSNQYISMGILVQTASGYPMFKTLKIQYLSDGLNRKSCSIATVPDGCAMYCYVSTQLETDDYAGSSPPTQKLTLLFYNDTVTERTISPTGLEGNWATLVPGVGSGIYFENKLIFPAYGGVLPNSSLGVKSAREFFRPVNPYNPCSGPQQDLDQRALRSYFPSYFSNRRVQSAFLVCAWNQILVTNCELVVPSNNQTLMGAEGRVLLINNRLLYYQRSTSWWPYELLYEISFTFTNSGQSSVNMSWIPIYSFTRPGSGNCSGENVCPTACVSGVYLDPWPLTPYSHQSGINRNFYFTGALLNSSTTRVNPTLYVSALNNLKVLAPYGNQGLFASYTTTTCFQDTGDASVYCVYIMELASNIVGEFQILPVLTRLTIT

SEQ ID NO: 63 - protein, 572 aa, Human respirovirus 3
  MISC_FEATURE: hemagglutinin-neuraminidase
MEYWKHTNHGKDAGNELETATATHGNRLTNKITYILWTITLVLLSIVFIIVLINSIKSEKAHESLLQDINNEFMEVTEKIQVASDNTNDLIQSGVNTRLLTIQSHVQNYIPISLTQQISDLRKFISEITIRNDNQEVPPQRITHDVGIKPLNPDDFWRCTSGLPSLMRTPKIRLMPGPGLLAMPTTVDGCVRTPSLVINDLIYAYTSNLITRGCQDIGKSYQVLQIGIITVNSDLVPDLNPRISHTFNINDNRKSCSLALLNTDVYQLCSTPKVDERSDYASSGIEDIVLDIVNYDGSISTTRFKNNNISFDQPYAALYPSVGPGIYYKGKIIFLGYGGLEHPINENAICNTTGCPGKTQRDCNQASHSPWFSDRRMVNSIIVVDKGLNSVPKLKVWTISMRQNYWGSEGRLLLLGNKIYIYTRSTSWHSKLQLGIIDITDYSDIRIKWTWHNVLSRPGNNECPWGHSCPDGCITGVYTDAYPLNPTGSIVSSVILDSQKSRVNPVITYSTATERVNELAIRNKTLSAGYTTTSCITHYNKGYCFHIVEINHKSLNTFQPMLFKTEIPKSCS

SEQ ID NO: 64 - protein, 220 aa, Human metapneumovirus
  MISC_FEATURE: attachment glycoprotein G
MEVKVENIRAIDMLKARVKNRVARSKCFKNASLILIGITTLSIALNIYLIINYTIQKTTSESEHHTSSPPTESNKETSTIPIDNPDITPNSQHPTQQSTESLTLYPASSMSPSETEPASTPGITNRLSLADRSTTQPSESRTKTNSTVHKKNKKNISSTISRTQSPPRTTAKAVSRTTALRMSSTGERPTTTSVQSDSSTTAQNHEETGPANPQASVSTM

SEQ ID NO: 65 - protein, 607 aa, Canine distemper virus
  MISC_FEATURE: hemagglutinin
MLSYQDKVGAFYKDNARANSSKLSLVTEEQGGRRPPYLLFVLLILLVGILALLAIAGVRFRQVSTSNVEFGRLLKDDLEKSEAVHHQVMDVLTPLFKIIGDEIGLRLPQKLNEIKQFILQKTNFFNPNREFDFRDLHWCINPPSKIKVNFTNYCDAIGVRKSIASAANPILLSALSGGRGDIFPPYRCSGATTSVGRVFPLSVSLSMSLISKTSEIISMLTAISDGVYGKTYLLVPDYIEREFDTQKIRVFEIGFIKRWLNDMPLLQTTNYMVLPENSKAKVCTIAVGELTLASLCVDESTVLLYHDSNGSQDSILVVTLGIFGATPMNQVEEVIPVAHPSVERIHITNHRGFIKDSVATWMVPALVSEQQEGQKNCLESACQRKSYPMCNQTSWEPFGGVQLPSYGRLTLPLDASIDLQLNISFTYGPVILNGDGMDYYENPLLDSGWLTIPPKNGTILGLINKASRGDQFTVTPHVLTFAPRESSGNCYLPIQTSQIMDKDVLTESNLVVLPTQNFRYVVATYDISRENHAIVYYVYDPIRTISYTYPFRLTTKGRPDFLRIECFVWDDDLWCHQFYRFESDITNSTTSVEDLVRIRFSCNRSKP

SEQ ID NO: 66 - protein, 609 aa, Peste-des-petits-ruminants virus
  MISC_FEATURE: haemagglutinin
MSAQRERINAFYKDNPHNKNHRVILDRERLVIERPYILLGVLLVMFLSLIGLLAIAGIRLHRATVGTSEIQSRLNTNIELTESIDHQTKDVLTPLFKIIGDEVGIRIPQKFSDLVKFISDKIKFLNPDREYDFRDLRWCMNPPERVKINFDQFCEYKAAVKSIEHIFESPLNKSKKLQSLTLGPGTGCLGRTVTRAHFSELTLTLMDLDLEMKHNVSSVFTVVEEGLFGRTYTVWRSDARDPSTDLGIGHFLRVFEIGLVRDLGLGPPVFHMTNYLTVNMSDDYRRCLLAVGELKLTALCSSSETVTLGERGVPKREPLVVVILNLAGPTLGGELYSVLPTSDLMVEKLYLSSHRGIIKDDEANWVVPSTDVRDLQNKGECLVEACKTRPPSFCNGTGSGPWSEGRIPAYGVIRVSLDLASDPGVVITSVFGPLIPHLSGMDLYNNPFSRAVWLAVPPYEQSFLGMINTIGFPNRAEVMPHILTTEIRGPRGRCHVPIELSRRVDDDIKIGSNMVILPTIDLRYITATYDVSRSEHAIVYYIYDTGRSSSYFYPVRLNFKGNPLSLRIECFPWRHKVWCYHDCLIYNTITDEEVHTRGLTGIEVTCNPV

SEQ ID NO: 67 - protein, 575 aa, Sendai virus
  MISC_FEATURE: hemagglutinin-neuraminidase protein
MDGDRSKRDSYWSTSPGGSTTKLVSDSERSGKVDTWLLILAFTQWALSIATVIICIVIAARQGYSMERYSMTVEALNTSNKEVKESLTSLIRQEVITRAANIQSSVQTGIPVLLNKNSRDVIRLIEKSCNRQELTQLCDSTIAVHHAEGIAPLEPHSFWRCPAGEPYLSSDPEVSLLPGPSLLSGSTTISGCVRLPSLSIGEAIYAYSSNLITQGCADIGKSYQVLQLGYISLNSDMFPDLNPVVSHTYDINDNRKSCSVVATGTRGYQLCSMPIVDERTDYSSDGIEDLVLDILDLKGRTKSHRYSNSEIDLDHPFSALYPSVGSGIATEGSLIFLGYGGLTTPLQGDTKCRIQGCQQVSQDTCNEALKITWLGGKQVVSVLIQVNDYLSERPRIRVTTIPITQNYLGAEGRLLKLGDQVYIYTRSSGWHSQLQIGVLDVSHPLTISWTPHEALSRPGNEDCNWYNTCPKECISGVYTDAYPLSPDAANVATVTLYANTSRVNPTIMYSNTTNIINMLRIKDVQLEAAYTTTSCITHFGKGYCFHIIEINQKSLNTLQPMLFKTSIPKLCKAES

SEQ ID NO: 68 - protein, 575 aa, Human parainfluenza virus 1 strain Washington/1964
  MISC_FEATURE: HN glycoprotein
MAEKGKTNSSYWSTTRNDNSTVNTHINTPAGRTHIWLLIATTMHTVLSFIIMILCIDLIIKQDTCMKTNIMTVSSMNESAKIIKETITELIRQEVISRTINIQSSVQSGIPILLNKQSRDLTQLIEKSCNRQELAQICENTIAIHHADGISPLDPHDFWRCPVGEPLLSNNPNISLLPGPSLLSGSTTISGCVRLPSLSIGDAIYAYSSNLITQGCADIGKSYQVLQLGYISLNSDMYPDLNPVISHTYDINDNRKSCSVIAAGTRGYQLCSLPTVNETTDYSSEGIEDLVFDILDLKGKTKSHRYKNEDITFDHPFSAMYPSVGSGIKIENTLIFLGYGGLTTPLQGDTKCVINRCTNVNQSVCNDALKITWLKKRQVVNVLIRINNYLSDRPKIVVETIPITQNYLGAEGRLLKLGKKIYIYTRSSGWHSNLQIGSLDINNPMTIKWAPHEVLSRPGNQDCNWYNRCPRECISGVYTDAYPLSPDAVNVATTTLYANTSRVNPTIMYSNTSEIINMLRLKNVQLEAAYTTTSCITHFGKGYCFHIVEINQASLNTLQPMLFKTSIPKICKITS

SEQ ID NO: 69 - protein, 240 aa, Human metapneumovirus
  MISC_FEATURE: attachment glycoprotein G
MEVRVENIRAIDMFKAKMKNRIRSSKCYRNATLILIGLTALSMALNIFLIIDYATLKNMTKVEHCVNMPPVEPSKKSPMTSAADLNTKLNPQQATQLTTEDSTSLAATSENHLHTETTPTSDATISQQATDEHTTLLRPINRQTTQTTTEKKPTGATTKKDKEKETTTRTTSTAATQTLNTTNQTSNGREATTTSARSRNGATTQNSDQTIQAADPSSKPYHTQTNTTTAHNTDTSSLSS

SEQ ID NO: 70 - protein, 604 aa, Hendra virus
  MISC_FEATURE: glycoprotein
MMADSKLVSLNNNLSGKIKDQGKVIKNYYGTMDIKKINDGLLDSKILGAFNTVIALLGSIIIIVMNIMIIQNYTRTTDNQALIKESLQSVQQQIKALTDKIGTEIGPKVSLIDTSSTITIPANIGLLGSKISQSTSSINENVNDKCKFTLPPLKIHECNISCPNPLPFREYRPISQGVSDLVGLPNQICLQKTTSTILKPRLISYTLPINTREGVCITDPLLAVDNGFFAYSHLEKIGSCTRGIAKQRIIGVGEVLDRGDKVPSMFMTNVWTPPNPSTIHHCSSTYHEDFYYTLCAVSHVGDPILNSTSWTESLSLIRLAVRPKSDSGDYNQKYIAITKVERGKYDKVMPYGPSGIKQGDTLYFPAVGFLPRTEFQYNDSNCPIIHCKYSKAENCRLSMGVNSKSHYILRSGLLKYNLSLGGDIILQFIEIADNRLTIGSPSKIYNSLGQPVFYQASYSWDTMIKLGDVDTVDPLRVQWRNNSVISRPGQSQCPRFNVCPEVCWEGTYNDAFLIDRLNWVSAGVYLNSNQTAENPVFAVFKDNEILYQVPLAEDDTNAQKTITDCFLLENVIWCISLVEIYDTGDSVIRPKLFAVKIPAQCSES

SEQ ID NO: 71 - protein, 602 aa, Nipah virus
  MISC_FEATURE: attachment glycoprotein
MPAENKKVRFENTTSDKGKIPSKVIKSYYGTMDIKKINEGLLDSKILSAFNTVIALLGSIVIIVMNIMIIQNYTRSTDNQAVIKDALQGIQQQIKGLADKIGTEIGPKVSLIDTSSTITIPANIGLLGSKISQSTASINENVNEKCKFTLPPLKIHECNISCPNPLPFREYRPQTEGVSNLVGLPNNICLQKTSNQILKPKLISYTLPVVGQSGTCITDPLLAMDEGYFAYSHLERIGSCSRGVSKQRIIGVGEVLDRGDEVPSLFMTNVWTPPNPNTVYHCSAVYNNEFYYVLCAVSTVGDPILNSTYWSGSLMMTRLAVKPKSNGGGYNQHQLALRSIEKGRYDKVMPYGPSGIKQGDTLYFPAVGFLVRTEFKYNDSNCPITKCQYSKPENCRLSMGIRPNSHYILRSGLLKYNLSDGENPKVVFIEISDQRLSIGSPSKIYDSLGQPVFYQASFSWDTMIKFGDVLTVNPLVVNWRNNTVISRPGQSQCPRFNTCPEICWEGVYNDAFLIDRINWISAGVFLDSNQTAENPVFTVFKDNEILYRAQLASEDTNAQKTITNCFLLKNKIWCISLVEIYDTGDNVIRPKLFAVKIPEQCT

SEQ ID NO: 72 - protein, 572 aa, Swine parainfluenza virus 3
  MISC_FEATURE: hemagglutinin-neuraminidase HN|
MEYWKHTNSTKDTNNELGTTRDRHSSKATNIIMYIFWTTTSTILSVIFIMILINLIQENNHNKLMLQEIKKEFAVIDTKIQKTSDDISTSIQSGINTRLLTIQSHVQNYIPLSLTQQMSDLRKFINDLTTKREHQEVPIQRMTHDSGIEPLNPDKFWRCTSGNPSLTSSPKIRLIPGPGLLATSTTVNGCIRIPSLAINNLIYAYTSNLITQGCQDIGKSYQVLQIGIITINSDLVPDLNPRVTHTFNIDDNRKSCSLALLNTDVYQLCSTPKVDERSDYASTGIEDIVLDIVTSNGLIITTRFTNNNITFDKPYAALYPSVGPGIYYKDKVIFLGYGGLEHEENGDVICNTTGCPGKTQRDCNQASYSPWFSNRRMVNSIIVVDKSIDTTFSLRVWTIPMRQNYWGSEGRLLLLGDRIYIYTRSTSWHSKLQLGVIDISDYNNIRINWTWHNVLSRPGNDECPWGHSCPDGCITGVYTDAYPLNPSGSVVSSVILDSQKSRENPIITYSTATNRVNELAIYNRTLPAAYTTTNCITHYDKGYCFHIVEINHRSLNTFQPMLFKTEVPKNCS

SEQ ID NO: 73 - protein, 231 aa, Human metapneumovirus
  MISC_FEATURE: attachment glycoprotein G
MEVRVENIRAIDMFKAKIKNRIRSSRCYRNATLILIGLTALSMALNIFLIIDHATLRNMIKTENCANMPSAEPSKKTPMTSTAGPSTKPNPQQATQWTTENSTSPAATLEGHPYTGTTQTPDTTAPQQTTDKHTALPKSTNEQITQTTTEKKTTRATTQKREKRKENTNQTTSTAATQTTNTTNQTRNASETITTSDGPRIDTTTQSSEQTARATEPGSSPYHARRGAGPR

SEQ ID NO: 74 - protein, 595 aa, Feline morbillivirus
  MISC_FEATURE: hemagglutinin protein
MKNINIKYYKDSNRYLGKILDEHKIVNSQLYSLSIKVITIIAIIVSLIATIMTIINATSGRTTLNSNTDILLNQRDEIHSIHEMIFDRVYPLITAMSTELGLHIPTLLDELTKAIDQKIKIMNPPVDTVTSDLSWCIKPPNGIIIDPKGYCESMELSKTYKLLLDQLDVSRKKSLTINRKNINQCQLVDDSEIIFATVNIQSTPRFLNFGHTVSNQRITFGQGTYSSTYILTIQEDGITDVQYRVFEIGYISDQFGVFPSLIVSRVLPIRMVLGMESCTLTSDRQGGYFLCMNTLTRSIYDYVNIRDLKSLYITLPHYGKVNYTYFNFGKIRSPHEIDKLWLTSDRGQIISGYFAAFVTITIRNYNNYPYKCLNNPCFDNSENYCRGWYKNITGTDDVPILAYLLVEMYDEEGPLITLVAIPPYNYTAPSHNSLYYDDKINKLIMTTSHIGYIQINEVHEVIVGDNLKAILLNRLSDEHPNLTACRLNQGIKEQYKSDGMIISNSALIDIQERMYITVKAIPPVGNYNFTVELHSRSNTSYILLPKQFNAKYDKLHLECFNWDKSWWCALIPQFSLSWNESLSVDTAIFNLINCK

SEQ ID NO: 75 - protein, 613 aa, Avian paramyxovirus 6
  MISC_FEATURE: hemagglutinin-neuraminidase
MASPSELNRSQATLYEGDPNSKRTWRTVYRASTLILDLAILCVSIVAIVRMSTLTPSDVTDSISSSITSLSDTYQSVWSDTHQKVNSIFKEVGISIPVTLDKMQVEMGTAVNIITDAVRQLQGVNGSAGFSITNSPEYSGGIDALIYPQKSLNGKSLAISDLLEHPSFIPAPTTSHGCTRIPTFHLGYRHWCYSHNTIESGCHDAGESIMYLSMGAVGVGHQGKPVFTTSAAVILDDGKNRKSCSVVANPNGCDVLCSLVKQTEDQDYADPTPTPMIHGRLHFNGTYTESMLDQSLFTGHWVAQYPAVGSGSVSHGRLFFPLYGGISKSSSLFPKLRAHAYFTHNEELECKNLTSKQREDLFNAYMPGKIAGSLWAQGIVICNLTTLADCKIAVANTSTMMMAAEGRLQLVQDKVVLYQRSSSWWPVLIYYDILVSELVNARHLDIVNWVPYPQSKFPRPTWTKGLCEKPSICPAVCVTGVYQDVWVVSVGDFSNETVVIGGYLEAASERKDPWIAAANQYNWLTRRQLFTAQTEAAYSSTTCFRNTHQDKVFCLTIMEVTDNLLGDWRIAPLLYEVTVVDRQQSSRKAVAMSEAHRTRFKYYSPENKFTPQH

SEQ ID NO: 76 - protein, 564 aa, Fer-de-Lance paramyxovirus
  MISC_FEATURE: hemagglutinin-neuraminidase protein HN
MDPKSYYCNEDLRSDGGEKSPGGDLYKGIILVSTVISLIIAIISLAFIIDNKINIQSLDPLRGLEDSYLVPIKDKSESISQDIQEGIFPRLNLITAATTTTIPRSIAIQTKDLSDLIMNRCYPSVVNNDTSCDVLAGAIHSNLFSQLDPSTYWTCSSGTPTMNQTVKLLPDNSQIPGSTYSTGCVRIPTFSLGSMIYSYSHNVIYEGCNDHSKSSQYWQLGYISTSKTGEPLQQVSRTLTLNNGLNRKSCSTVAQGRGAYLLCTNVVEDERTDYSTEGIQDLTLDYIDIFGAERSYRYTNNEVDLDRPYAALYPSVGSGTVYNDRILFLGYGGLMTPYGDQAMCQAPECTSATQEGCNSNQLIGYFSGRQIVNCIIEIITVGTEKPIIRVRTIPNSQVWLGAEGRIQTLGGVLYLYIRSSGWHALAQTGIILTLDPIRISWIVNTGYSRPGNGPCSASSRCPAQCITGVYTDIFPLSQNYGYLATVTLLSGVDRVNPVISYGTSTGRVADSQLTSSSQVAAYTTTTCFTFNQKGYCYHIIELSPATLGIFQPVLVVTEIPKICS

SEQ ID NO: 77 - protein, 569 aa, Avian paramyxovirus 4
  MISC_FEATURE: hemagglutinin-neuraminidase
MQGNMEGSRDNLTVDDELKTTWRLAYRVVSLLLMVSALIISIVILTRDNSQSIITAINQSSDADSKWQTGIEGKITSIMTDTLDTRNAALLHIPLQLNTLEANLLSALGGNTGIGPGDLEHCRYPVHDTAYLHGVNRLLINQTADYTAEGPLDHVNFIPAPVTTTGCTRIPSFSVSSSIWCYTHNVIETGCNDHSGSNQYISMGVIKRAGNGLPYFSTVVSKYLTDGLNRKSCSVAAGSGHCYLLCSLVSEPEPDDYVSPDPTPMRLGVLTWDGSYTEQAVPERIFKNIWSANYPGVGSGAIVGNKVLFPFYGGVRNGSTPEVMNRGRYYYIQDPNDYCPDPLQDQILRAEQSYYPTRFGRRMVMQGVLACPVSNNSTIASQCQSYYFNNSLGFIGAESRIYYLNGNIYLYQRSSSWWPHPQIYLLDSRIASPGTQNIDSGVNLKMLNVTVITRPSSGFCNSQSRCPNDCLFGVYSDIWPLSLTSDSIFAFTMYLQGKTTRIDPAWALFSNHAIGHEARLFNKEVSAAYSTTTCFSDTIQNQVYCLSILEVRSELLGAFKIVPFLYRVL

SEQ ID NO: 78 - protein, 571 aa, Human parainfluenza virus 2
  MISC_FEATURE: hemagglutinin-neuraminidase protein
MEDYSNLSLKSIPKRTCRIIFRTATILGICTLIVLCSSILHEIIHLDVSSGLMDSDDSQQGIIQPIIESLKSLIALANQILYNVAIIIPLKIDSIETVIFSALKDMHTGSMSNTNCTPGNLLLHDAAYINGINKFLVLKSYNGTPKYGPLLNIPSFIPSATSPNGCTRIPSFSLIKTHWCYTHNVMLGDCLDFTTSNQYLAMGIIQQSAAAFPIFRTMKTIYLSDGINRKSCSVTAIPGGCVLYCYVATRSEKEDYATTDLAELRLAFYYYNDTFIERVISLPNTTGQWATINPAVGSGIYHLGFILFPVYGGLISGTPSYNKQSSRYFIPKHPNITCAGNSSEQAAAARSSYVIRYHSNRLIQSAVLICPLSDMHTARCNLVMFNNSQVMMGAEGRLYVIDNNLYYYQRSSSWWSASLFYRINTDFSKGIPPIIEAQWVPSYQVPRPGVMPCNATSFCPANCITGVYADVWPLNDPEPTSQNALNPNYRFAGAFLRNESNRTNPTFYTASASALLNTTGFNNTNHKAAYTSSTCFKNTGTQKIYCLIIIEMGSSLLGEFQIIPFLRELIP

SEQ ID NO: 79 - protein, 565 aa, Parainfluenza virus 5
  MISC_FEATURE: hemagglutinin-neuraminidase protein
MVAEDAPVRATCRVLFRTTTLIFLCTLLALSISILYESLITQKQIMSQAGSTGSNSGLGSITDLLNNILSVANQIIYNSAVALPLQLDTLESTLLTAIKSLQTSDKLEQNCSWSAALINDNRYINGINQFYFSIAEGRNLTLGPLLNMPSFIPTATTPEGCTRIPSFSLTKTHWCYTHNVILNGCQDHVSSNQFVSMGIIEPTSAGFPFFRTLKTLYLSDGVNRKSCSISTVPGGCMMYCFVSTQPERDDYFSAAPPEQRIIIMYYNDTIVERIINPPGVLDVWATLNPGTGSGVYYLGWVLFPIYGGVIKGTSLWNNQANKYFIPQMVAALCSQNQATQVQNAKSSYYSSWFGNRMIQSGILACPLRQDLTNECLVLPFSNDQVLMGAEGRLYMYGDSVYYYQRSNSWWPMTMLYKVTITFTNGQPSAISAQNVPTQQVPRPGTGDCSATNRCPGFCLTGVYADAWLLTNPSSTSTFGSEATFTGSYLNTATQRINPTMYIANNTQIISSQQFGSSGQEAAYGHTTCFRDTGSVMVYCIYIIELSSSLLGQFQIVPFIRQVTLS

SEQ ID NO: 80 - protein, 576 aa, Porcine rubulavirus
  MISC_FEATURE: attachment protein
MSQLGTDQIMHLAQPAIARRTWRLCFRIFALFILIAIVITQIFMLTFDHTLLTTTQFLTSIGNLQSTITSWTPDVQAMLSISNQLIYTTSITLPLKISTTEMSILTAIRDHCHCPDCSSACPTRQMLLNDPRYMSGVNQFIGAPTESINITFGPLFGIPSFIPTSTTTQGCTRIPSFALGPSHWCYTHNFITAGCADGGHSNQYLAMGTIQSASDGSPLLITARSYYLSDGVNRKSCSIAVVPGGCAMYCYVATRSETDYYAGNSPPQQLLTLVFSNDTIIERTIHPTGLANGWVMLVPGVGSGTLYNEYLLFPAYGGMQQILANQSGEINQFFTPYNATVRCAMAQPQFSQRAAASYYPRYFSNRWIRSAIVACPYRAIYQTQCTLIPLPNRMVMMGSEGRIFTLGDRLFYYQRSSSWWPYPLLYQVGLNFLTTPPSVSSMTQVPLEHLARPGKGGCPGNSHCPATCVTGVYADVWPLTDPRSGVGGTSLVAAGGLDSTSERMAPVNYLAIGESLLSKTYLLSKTQPAAYTTTTCFRDTDTGKIYCITIAELGKVLLGEFQIVPFLREIKIQSRY

SEQ ID NO: 81 - protein, 580 aa, Avian paramyxovirus 2
  MISC_FEATURE: hemagglutinin-neuraminidase
MDFPSRENLAAGDISGRKTWRLLFRILTLSIGVVCLAINIATIAKLDHLDNMASNTWTTTEADRVISSITTPLKVPVNQINDMFRIVALDLPLQMTSLQKEITSQVGFLAESINNVLSKNGSAGLVLVNDPEYAGGIAVSLYQGDASAGLNFQPISLIEHPSFVPGPTTAKGCIRIPTFHMGPSHWCYSHNIIASGCQDASHSSMYISLGVLKASQTGSPIFLTTASHLVDDNINRKSCSIVASKYGCDILCSIVIETENEDYRSDPATSMIIGRLFFNGSYTESKINTGSIFSLFSANYPAVGSGIVVGDEAAFPIYGGVKQNTWLFNQLKDFGYFTHNDVYKCNRTDIQQTILDAYRPPKISGRLWVQGILLCPVSLRPDPGCRLKVFNTSNVMMGAEARLIQVGSTVYLYQRSSSWWVVGLTYKLDVSEITSQTGNTLNHVDPIAHTKFPRPSFRRDACARPNICPAVCVSGVYQDIWPISTATNNSNIVWVGQYLEAFYSRKDPRIGIATQYEWKVTNQLFNSNTEGGYSTTTCFRNTKRDKAYCVVISEYADGVFGSYRIVPQLIEIRTTTGKSE

SEQ ID NO: 82 - protein, 236 aa, Human metapneumovirus
  MISC_FEATURE: attachment glycoprotein G
MEVKVENIRTIDMLKARVKNRVARSKCFKNASLILIGITTLSIALNIYLIINYTMQENTSESEHHTSSSPMESSRETPTVPIDNSDTNPSSQYPTQQSTEGSTLYFAASASSPETEPTSTPDTTSRPPFVDTHTTPPSASRTKTSPAVHTKNNPRISSRTHSPPWAMTRTVRRTTTLRTSSIRKRSSTASVQPDSSATTHKHEEASPVSPQTSASTTRPQRKSMEASTSTTYNQTS

SEQ ID NO: 83 - protein, 414 aa, Canine pneumovirus
  MISC_FEATURE: attachment protein
MRPAEQLIQENYKLTSLSMGRNFEVSGSTTNLNFERTQYPDTFRAVVKVNQMCKLIAGVLTSAAVAVCVGVIMYSVFTSNHKANSMQNATIRNSTSAPPQPTAGPPTTEQGTTPKFTKPPTKTTTHHEITEPAKMVTPSEDPYQCSSNGYLDRPDLPEDFKLVLDVICKPPGPEHHSTNCYEKREINLGSVCPDLVTMKANMGLNNGGGEEAAPYIEVITLSTYSNKRAMCVHNGCDQGFCFFLSGLSTDQKRAVLELGGQQAIMELHYDSYWKHYWSNSNCVVPRTNCNLTDQTVILFPSFNNKNQSQCTTCADSAGLDNKFYLTCDGLSRNLPLVGLPSLSPQAHKAALKQSTGTTTAPTPETRNPTPAPRRSKPLSRKKRALCGVDSSREPKPTMPYWCPMLQLFPRRSNS

SEQ ID NO: 84 - protein, 228 aa, Respiratory syncytial virus type A
  MISC_FEATURE: truncated attachment glycoprotein
MSKTKDQRAAKTLEKTWDTLNHLLFISSCLYKSNLKSIAQITLSILAMTIPTSLIIVATTFIASANNKVTPTTAIIQDATSQIKNTTPTHLTQNPQPGISFFNLSGTISQTTAILAPTTPSVEPILQSTTVKTKNTTTTQIQPSKLTTKQRQNKPPNKPNDDFHFEVFNFVPCSICSNNPTCWAICKRIPSKKPGKKTTTKPTKKQTIKTTKKDLKPQTTKPKEAPTT

SEQ ID NO: 85 - protein, 577 aa, Avian paramyxovirus 8
  MISC_FEATURE: hemagglutinin-neuraminidase protein
MSNIASSLENIVEQDSRKTTWRAIFRWSVLLITTGCLALSIVSIVQIGNLKIPSVGDLADEVVTPLKTTLSDTLRNPINQINDIFRIVALDIPLQVTSIQKDLASQFSMLIDSLNAIKLGNGTNLIIPTSDKEYAGGIGNPVFTVDAGGSIGFKQFSLIEHPSFIAGPTTTRGCTRIPTFHMSESHWCYSHNIIAAGCQDASASSMYISMGVLHVSSSGTPIFLTTASELIDDGVNRKSCSIVATQFGCDILCSIVIEKEGDDYWSDTPTPMRHGRFSFNGSFVETELPVSSMFSSFSANYPAVGSGEIVKDRILFPIYGGIKQTSPEFTELVKYGLFVSTPTTVCQSSWTYDQVKAAYRPDYISGRFWAQVILSCALDAVDLSSCIVKIMNSSTVMMAAEGRIIKIGIDYFYYQRSSSWWPLAFVTKLDPQELADTNSIWLTNSIPIPQSKFPRPSYSENYCTKPAVCPATCVTGVYSDIWPLTSSSSLPSIIWIGQYLDAPVGRTYPRFGIANQSHWYLQEDILPTSTASAYSTTTCFKNTARNRVFCVTIAEFADGLFGEYRITPQLYELVRNN

SEQ ID NO: 86 - protein, 576 aa, Porcine parainfluenza virus 1
  MISC_FEATURE: haemagglutinin protein
MEETKVKTSEYWARSPQIHATNHPNVQNREKIKEILTILISFISSLSLVLVIAVLIMQSLHNGTILRCKDVGLESINKSTYSISNAILDVIKQELITRIINTQSSVQVALPILINKKIQDLSLIIEKSSKVHQNSPTCSGVAALTHVEGIKPLDPDDYWRCPSGEPYLEDELTLSLIPGPSMLAGTSTIDGCVRLPSLAIGKSLYAYSSNLITKGCQDIGKSYQVLQLGIITLNSDLHPDLNPIISHTYDINDNRKSCSVAVSETKGYQLCSMPRVNEKTDYTSDGIEDIVFDVLDLKGSSRSFKFSNNDINFDHPFSALYPSVGSGIIWKNELYFLGYGALTTALQGNTKCNLMGCPGATQDNCNKFISSSWLYSKQMVNVLIQVKGYLSSKPSIIVRTIPITENYVGAEGKLVGTRERIYIYTRSTGWHTNLQIGVLNINHPITITWTDHRVLSRPGRSPCAWNNKCPRNCTTGVYTDAYPISPDANYVATVTLLSNSTRNNPTIMYSSSDRVYNMLRLRNTELEAAYTTTSCIVHFDRGYCFHIIEINQKELNTLQPMLFKTAIPKACRISNL

SEQ ID NO: 87 - protein, 579 aa, Human parainfluenza virus 4b
  MISC_FEATURE: hemagglutinin-neuraminidase protein
MQDSRGNTQIFSQANSMVKRTWRLLFRIVTLILLISIFVLSLIIVLQSTPGNLQSDVDIIRKELDELMENFETTSKSLLSVANQITYDVSVLTPIRQEATETNIIAKIKDHCKDRVVKGESTCTLGHKPLHDVSFLNGFNKFYFTYRDNVQIRLNPLLDYPNFIPTATTPHGCIRIPSFSLSQTHWCYTHNTILRGCEDTASSKQYVSLGTLQTLENGDPYFKVEYSHYLNDRKNRKSCSVVAVLDGCLLYCVIMTKNETENFKDPQLATQLLTYISYNGTIKERIINPPGSSRDWVHISPGVGSGILYSNYIIFPLYGGLMENSMIYNNQSGKYFFPNSTKLPCSNKTSEKITGAKDSYTITYFSKRLIQSAFLICDLRQFLSEDCEILIPSNDHMLVGAEGRLYNIENNIFYYQRGSSWWPYPSLYRIKLNSNKKYPRIIEIKFTKIEIAPRPGNKDCPGNKACPKECITGVYQDIWPLSYPNTAFPHKKRAYYTGFYLNNSLARRNPTFYTADNLDYHQQERLGKFNLTAGYSTTTCFKQTTTARLYCLYILEVGDSVIGDFQIFPFLRSIDQAIT

SEQ ID NO: 88 - protein, 582 aa, Avian paramyxovirus 2
  MISC_FEATURE: hemagglutinin-neuraminidase protein
MDALSRENLTEISQGGRRTWRMLFRILTLVLTLVCLAINIATIAKLDSIDTSKVQTWTTTESDRVIGSLTDTLKIPINQVNDMFRIVALDLPLQMTTLQKEIASQVGFLAESINNFLSKNGSAGSVLVNDPEYAGGIGTSLFHGDSASGLDFEAPSLIEHPSFIPGPTTAKGCIRIPTFHMSASHWCYSHNIIASGCQDAGHSSMYISMGVLKATQAGSPSFLTTASQLVDDKLNRKSCSIISTTYGCDILCSLVVENEDADYRSDPPTDMILGRLFFNGTYSESKLNTSAIFQLFSANYPAVGSGIVLGDEIAFPVYGGVKQNTWLFNQLKDYGYFAHNNVYKCNNSNIHQTVLNAYRPPKISGRLWSQVVLICPMRLFINTDCRIKVFNTSTVMMGAEARLIQVGSDIYLYQRSSSWWVVGLTYKLDFQELSSKTGNILNNVSPIAHAKFPRPSYSRDACARPNICPAVCVSGVYQDIWPISTAHNLSQVVWVGQYLEAFYARKDPWIGIATQYDWKKNVRLFNANTEGGYSTTTCFRNTKRDKAFCVIISEYADGVFGSYRIVPQLIEIRTTSKKGLPS

SEQ ID NO: 89 - protein, 610 aa, Avian paramyxovirus goose/Shimane/67/2000
  MISC_FEATURE: hemagglutinin-neuraminidase
MQPGISEVSFVNDERSERGTWRLLFRILTIVLCLTSIGIGIPALIYSKEAATSGDIDKSLEAVKTGMSTLSSKIDESINTEQKIYRQVILEAPVSQLNMESNILSAITSLSYQIDGTSNSSGCGSPMHDQDFVGGINKEIWTTDNVNLGEITLTPFLEHLNFIPAPTTGNGCTRIPSFDLGLTHWCYTHNVILSGCQDYSSSFQYIALGVLKISATGHVFLSTMRSINLDDERNRKSCSISATSIGCDIICSLVTEREVDDYNSPAATPMIHGRLDFSGKYNEVDLNVGQLFGDWSANYPGVGGGSFLNGRVWFPIYGGVKEGTPTFKENDGRYAIYTRYNDTCPDSESEQVSRAKSSYRPSYFGGKLVQQAVLSIKIDDTLGLDPVLTISNNSITLMGAESRVLQIEEKLYFYQRGTSWFPSLIMYPLTVDDKMVRFEPPTIFDQFTRPGNHPCSADSRCPNACVTGVYTDGYPIVFHNNHSIAAVYGMQLNDVTNRLNPRSAVWYGVSMSNVIRVSSSTTKAAYTTSTCFKVKKTQRVYCLSIGEIGNTLFGEFRIVPLLLEVYSEKGKSLKSSFDGWEDISINNPLRPLDNHRVDPILISNYTSSWP

SEQ ID NO: 90 - protein, 257 aa, Bovine respiratory syncytial virus
  MISC_FEATURE: attachment glycoprotein
MSNHTHHLKFKTLKRAWKASKYFIVGLSCLYKFNLKSLVQTALTTLAMITLTSLVITAIIYISVGNAKAKPTSKPTIQQTQQPQNHTSPFFTEHNYKSTHTSIQSTTLSQLPNTDTTRETTYSHSINETQNRKIKSQSTLPATRKPPINPSGSNPPENHQDHNNSQTLPYVPCSTCEGNLACLSLCQIGPERAPSRAPTITLKKTPKPKTTKKPTKTTIHHRTSPEAKLQPKNNTAAPQQGILSSPEHHTNQSTTQI

SEQ ID NO: 91 - protein, 595 aa, Menangle virus
  MISC_FEATURE: attachment protein
MWNSIPQLVSDHEEAKGKFTDIPLQDDTDSQHPSGSKSTCRTLFRTVSIILSLVILVLGVTSTMFSAKYSGGCATNSQLLGVSNLINQIQKSIDSLISEVNQVSITTAVTLPIKIMDFGKSVTDQVTQMIRQCNTVCKGPGQKPGSQNVRIMPSNNLSTFQNINMSARGIAYQDVPLTFVRPIKNPQSCSRFPSYSVSFGVHCFANAVTDQTCELNQNTFYRVVLSVSKGNISDPSSLETKAETRTPKGTPVRTCSIISSVYGCYLLCSKATVPESEEMKTIGFSQMFILYLSMDSKRIIYDNIVSSTSAIWSGLYPGEGAGIWHMGQLFFPLWGGIPFLTPLGQKILNSTLDIPEVGSKCKSDLTSNPAKTKDMLFSPYYGENVMVFGFLTCYLLSNVPTNCHADYLNSTVLGFGSKAQFYDYRGIVYMYIQSAGWYPFTQIFRITLQLKQNRLQAKSIKRIEVTSTTRPGNRECSVLRNCPYICATGLFQVPWIVNSDAITSKEVDNMVFVQAWAADFTEFRKGILSLCSQVSCPINDLLSKDNSYMRDTTTYCFPQTVPNILSCTSFVEWGGDSGNPINILEIHYEVIFVAS

SEQ ID NO: 92 - protein, 574 aa, Avian paramyxovirus 5
  MISC_FEATURE: hemagglutinin neuraminidase protein
MDKSYYTEPEDQRGNSRTWRLLFRLIVLTLLCLIACTSVSQLFYPWLPQVLSTLISLNSSIITSSNGLKKEILNQNIKEDLIYREVAINIPLTLDRVTVEVGTAVNQITDALRQLQSVNGSAAFALSNSPDYSGGIEHLVFQRNTLINRSVSVSDLIEHPSFIPTPTTQHGCTRIPTFHLGTRHWCYSHNIIGQGCADSGASMMYISMGALGVSSLGTPTFTTSATSILSDSLNRKSCSIVATTEGCDVLCSIVTQTEDQDYADHTPTPMIHGRLWFNGTYTERSLSQSLFLGTWAAQYPAVGSGIMTPGRVIFPFYGGVIPNSPLFLDLERFALFTHNGDLECRNLTQYQKEAIYSAYKPPKIRGSLWAQGFIVCSVGDMGNCSLKVINTSTVMMGAEGRLQLVGDSVMYYQRSSSWWPVGILYRLSLVDIIARDIQVVINSEPLPLSKFPRPTWTPGVCQKPNVCPAVCVTGVYQDLWAISAGETLSEMTFFGGYLEASTQRKDPWIGVANQYSWFMRRRLFKTSTEAAYSSSTCFRNTRLDRNFCLLIFELTDNLLGDWRIVPLLFELTIV

SEQ ID NO: 93 - protein, 622 aa, Cedar virus
  MISC_FEATURE: attachment glycoprotein
MLSQLQKNYLDNSNQQGDKMNNPDKKLSVNFNPLELDKGQKDLNKSYYVKNKNYNVSNLLNESLHDIKFCIYCIFSLLIIITIINIITISIVITRLKVHEENNGMESPNLQSIQDSLSSLTNMINTEITPRIGILVTATSVTLSSSINYVGTKTNQLVNELKDYITKSCGFKVPELKLHECNISCADPKISKSAMYSTNAYAELAGPPKIFCKSVSKDPDFRLKQIDYVIPVQQDRSICMNNPLLDISDGFFTYIHYEGINSCKKSDSFKVLLSHGEIVDRGDYRPSLYLLSSHYHPYSMQVINCVPVTCNQSSFVFCHISNNTKTLDNSDYSSDEYYITYFNGIDRPKTKKIPINNMTADNRYIHFTFSGGGGVCLGEEFIIPVTTVINTDVFTHDYCESFNCSVQTGKSLKEICSESLRSPTNSSRYNLNGIMIISQNNMTDFKIQLNGITYNKLSFGSPGRLSKTLGQVLYYQSSMSWDTYLKAGFVEKWKPFTPNWMNNTVISRPNQGNCPRYHKCPEICYGGTYNDIAPLDLGKDMYVSVILDSDQLAENPEITVFNSTTILYKERVSKDELNTRSTTTSCFLFLDEPWCISVLETNRFNGKSIRPEIYSYKIPKYC

SEQ ID NO: 94 - protein, 595 aa, Teviot virus
  MISC_FEATURE: attachment protein
MWSTQASKHPAMVNSATNLVDIPLDHPSSAQFPINRKRTGRLIYRLFSILCNLILISILISLVVIWSRSSRDCAKSDGLSSVDNQLSSLSRSINSLITEVNQISVTTAINLPIKLSEFGKSVVDQVTQMIRQCNAACKGPGEKPGIQNVRINIPNNFSTYSELNRTANSLNFQSRTALFARPNPYPKTCSRFPSYSVYFGIHCFSHAVTDSSCELSDSTYYRLVIGVADKNLSDPADVKYIGETTTPVRVQTRGCSVVSSIYGCYLLCSKSNQDYQDDFREQGFHQMFILFLSRELKTTFFDDMVSSTTVTWNGLYPGEGSGIWHMGHLVFPLWGGIRFGTHASEGILNSTLELPPVGPSCKRSLADNGLINKDVLFSPYFGDSVMVFAYLSCYMLSNVPTHCQVETMNSSVLGFGSRAQFYDLKGIVYLYIQSAGWFSYTQLFRLSLQSKGYKLSVKQIKRIPISSTSRPGTEPCDIIHNCPYTCATGLFQAPWIVNGDSIRDRDVRNMAFVQAWSGAINTFQRPFMSICSQYSCPLSELLDSESSIMRSTTTYCFPSLTESILQCVSFIEWGGPVGNPISINEVYSSISFRPD

SEQ ID NO: 95 - protein, 632 aa, Mossman virus
  MISC_FEATURE: attachment glycoprotein
MVDPPAVSYYTGTGRNDRVKVVTTQSTNPYWAHNPNQGLRRLIDMVVNVIMVTGVIFALINIILGIVIISQSAGSRQDTSKSLDIIQHVDSSVAITKQIVMENLEPKIRSILDSVSFQIPKLLSSLLGPGKTDPPIALPTKASTPVIPTEYPSLNTTTCLRIEESVTQNAAALFNISFDLKTVMYELVTRTGGCVTLPSYSELYTRVRTFSTAIRNPKTCQRAGQETDLNLIPAFIGTDTGILINSCVRQPVIATGDGIYALTYLTMRGTCQDHRHAVRHFEIGLVRRDAWWDPVLTPIHHFTEPGTPVFDGCSLTVQNQTALALCTLTTDGPETDIHNGASLGLALVHFNIRGEFSKHKVDPRNIDTQNQGLHLVTTAGKSAVKKGILYSFGYMVTRSPEPGDSKCVTEECNQNNQEKCNAYSKTTLDPDKPRSMIIFQIDVGAEYFTVDKVVVVPRTQYYQLTSGDLFYTGEENDLLYQLHNKGWYNKPIRGRVTFDGQVTLHEHSRTYDSLSNQRACNPRLGCPSTCELTSMASYFPLDKDFKAAVGVIALRNGMTPIITYSTDDWRNHWKYIKNADLEFSESSLSCYSPNPPLDDYVLCTAVITAKVMSNTNPQLLATSWYQYDKCHT

SEQ ID NO: 96 - protein, 709 aa, J-virus
  MISC_FEATURE: attachment glycoprotein
MNPVAMSNFYGINQADHLREKGDQPEKGPSVLTYVSLITGLLSLFTIIALNVTNIIYLTGSGGTMATIKDNQQSMSGSMRDISGMLVEDLKPKTDLINSMVSYTIPSQISAMSAMIKNEVLRQCTPSFMFNNTICPIAEHPVHTSYFEEVGIEAISMCTGTNRKLVVNQGINFVEYPSFIPGSTKPGGCVRLPSFSLGLEVFAYAHAITQDDCTSSSTPDYYFSVGRIADHGTDVPVFETLAEWFLDDKMNRRSCSVTAAGKGGWLGCSILVGSFTDELTSPEVNRISLSYMDTFGKKKDWLYTGSEVRADQSWSALFFSVGSGVVIGDTVYFLVWGGLNHPINVDAMCRAPGCQSPTQSLCNYAIKPQEWGGNQIVNGILHFKHDTNEKPTLHVRTLSPDNNWMGAEGRLFHFHNSGKTFIYTRSSTWHTLPQVGILTLGWPLSVQWVDITSISRPGQSPCEYDNRCPHQCVTGVYTDLFPLGVSYEYSVTAYLDQVQSRMNPKIALVGAQEKIYEKTITTNTQHADYTTTSCFAYKLRVWCVSIVEMSPGVITTRQPVPFLYHLNLGCQDTSTGSLTPLDAHGGTYLNTDPVGNKVDCYFVLHEGQIYFGMSVGPINYTYSIVGRSREIGANMNVSLNQLCHSVYTEFLKEKEHPGTRNNIDVEGWLLKRIETLNGTKIFGLDDLEGSGPGHQSGPEDPSIAPIGHN

SEQ ID NO: 97 - protein, 264 aa, Avian metapneumovirus
  MISC_FEATURE: attachment glycoprotein
MEVKVENVGKSQELKVKVKNFIKRSDCKKKLFALILGLVSFELTMNIMLSVMYVESNEALSLCRIQGTPAPRDNKTNTENATKETTLHTTTTTRDPEVRETKTTKPQANEGATNPSRNLTTKGDKHQTTRATTEAELEKQSKQTTEPGTSTQKHTPARPSSKSPTTTQATAQPTTPTAPKASTAPKNRQATTKKTETDTTTASRARNTNNPTETATTTPKATTETGKGKEGPTQHTTKEQPETTARETTTPQPRRTAGASPRAS

SEQ ID NO: 98 - protein, 391 aa, Avian metapneumovirus
  MISC_FEATURE: attachment protein
MGSKLYMVQGTSAYQTAVGFWLDIGRRYILAIVLSAFGLTCTVTIALTVSVIVEQSVLEECRNYNGGDRDWWSTTQEQPTTAPSATPAGNYGGLQTARTRKSESCLHVQISYGDMYSRSDTVLGGFDCMGLLVLCKSGPICQRDNQVDPTALCHCRVDLSSVDCCKVNKISTNSSTTSEPQKTNPAWPSQDNTDSDPNPQGITTSTATLLSTSLGLMLTSKTGTHKSGPPQALPGSNTNGKTTTDRELGSTNQPNSTTNGQHNKHTQRMTLPPSYDNTRTILQHTTPWEKTFSTYKPTHSPTNESDQSLPTTQNSINCEHFDPQGKEKICYRVGSYNSNITKQCRIDVPLCSTYNTVCMKTYYTEPFNCWRRIWRCLCDDGVGLVEWCCTS

SEQ ID NO: 99 - protein, 1052 aa, Tailam virus
  MISC_FEATURE: attachment glycoprotein
MSQLAAHNLAMSNFYGIHQGGQSTSQKEEEQPVQGVIRYASMIVGLLSLFTIIALNVTNIIYMTESGGTMQSIKNAQGSIDGSMKDLSGTIMEDIKPKTDLINSMVSYNIPAQLSMIHQIIKNDVLKQCTPSFMFNNTICPLAENPTHSRYFEEVNLDSISECSGNEMSLELGTEPEFIEYPSFAPGSTKPGSCVRLPSFSLSSTVFAYTHTIMGHGCSELDVGDHYLAIGRIADAGHEIPQFETISSWFINDKINRRSCTVAAGVMETWMGCVIMTETFYDDLDSLDTGKITISYLDVFGRKKEWIYTRSEILYDYTYTSVYFSIGSGVVVGDTVYFLLWGSLSSPIEETAYCYAPGCSNYNQRMCNEAQRPAKFGHRQMANAILRFKTNSMGKPSISVRTLSPTVIPFGTEGRLIYSDFTKIIYLYLRSTSWYVLPLTGLLILGPPVSISWVTQEAVSRPGEYPCGASNRCPKDCITGVYTDLFPLGARYEYAVTVYLNAETYRVNPTLALIDRSKIIARKKITTESQKAGYTTTTCFVFKLRIWCMSVVELAPATMTAFEPVPFLYQLDLTCKRNNGTTAMQFSGQDGMYKSGRYKSPRNECFFEKVSNKYYFVVSTPEGIQPYEVRDLTPERVSHVIMYISDVCAPALSAFKKLIPAMRPITTLTIGNWQFRPVDISGGLRVNIYRNLTRYGDLSMSAPEDPGTDTFPGTHAPSKGHEEVGHYTLPNEKLSEVTTAAVKTKESLNLIPDTKDTRGEEENGSGLNEIITGHTTPGHIKTHPAETKVTKHTVIIPQIEEDGSGATTSTELQDETGYHTEDYNTTNTNGSLTAPNERNNYTSGDHTVSGEDITHTITVSDRTKTTQTLPTDNTFNQTPTKIQEGSPKSESTPKDYTAIESEDSHFTDPTLIRSTPEGTIVQVIGDQFHSAVTQLGESNAIGNSEPIDQGNNLIPTTDRGTMDNTSSQSHSSTTSTQGSHSAGHGSQSNMNLTALADTDSVTDQSTSTQEIDHEHENVSSILNPLSRHTRVMRDTVQEALTGAWGFIRGMIP

SEQ ID NO: 100 - protein, 242 aa, Human metapneumovirus
  MISC_FEATURE: attachment glycoprotein G
MEVRVENIRAIDMFKAKIKNRIRNSRCYRNATLILIGLTALSMALNIFLIIDHATLRNMIKTENCANMPSAEPSKKTPMTSIAGPSTKPNPQQATQWTTENSTSPAATLEGHPYTGTTQTPDTTAPQQTTDKHTALPKSTNEQITQTTTEKKTTRATTQKRKKEKKTQTKPQVQLQPKQPTPPTKSEMQVRQSQHPTDPELTPLPKAVNRQPGQQNQAPHHIMHGEVQDPGERNTQVSHPSS

SEQ ID NO: 101 - protein, 585 aa, Avian metapneumovirus type C
  MISC_FEATURE: attachment glycoprotein
MEVKIENVGKSQELRVKVKNFIKRSDCKKKLFALILGLISFDITMNIMLSVMYVESNEALSSCRVQGTPAPRDNRTNTENTAKETTLHTMTTTRNTEAGGTKTTKPQADERATSPSKNPTIGADKHKTTRATTEAEQEKQSKQTTEPGTSTPKHIPARPSSKSPATTKTTTQPTTPTVAKGGTAPKNRQTTTKKTEADTPTTSRAKQTNKPTGTETTPPRATTETDKDKEGPTQHTTKEQPETTAGGTTTPQPRRTTSRPAPTTNTKEGAETTGTRTTKSTQTSASPPRPTRSTPSKTATGTNKRATTTKGPNTASTDRRQQTRTTPKQDQQTQTKAKTTTNKAHAKAATTPEHNTDTTDSMKENSKEDKTTRDPSSKATTKQENTSKGTTATNLGNNTEAGARTPPTTTPTRHTTEPATSTAGGHTKARTTRWKSTAARQPTRNNTTADTKTAQSKQTTPAQLGNNTTPENTTPPDNKSNSQTNVAPTEEIEIGSSLWRRRYVYGPCRENALEHPMNPCLKDNTTWIYLDNGRNLPAGYYDSKTDKIICYGIYRGNSYCYGRIECTCKNGTGLLSYCCNSYNWS

SEQ ID NO: 102 - protein, 609 aa, Rinderpest morbillivirus
  MISC_FEATURE: H protein
MSSPRDRVNAFYKDNLQFKNTRVVLNKEQLLIERPYMLLAVLFVMFLSLVGLLAIAGIRLHRAAVNTAEINSGLTTSIDITKSIEYQVKDVLTPLFKIIGDEVGLRTPQRFTDLTKFISDKIKFLNPDKEYDFRDINWCISPPERIKINYDQYCAHTAAEELITMLVNSSLAGTAVLRTSLVNLGRSCTGSTTTKGQFSNMSLALSGIYSGRGYNISSMITITEKGMYGSTYLVGKHNQGARRPSTAWQRDYRVFEVGIIRELGVGTPVFHMTNYLELPRQPELEICMLALGEFKLAALCLADNSVALHYGGLRDDHKIRFVKLGVWPSPADSDTLATLSAVDPTLDGLYITTHRGIIAAGKAVWAVPVTRTDDQRKMGQCRREACREKPPPFCNSTDWEPLEAGRIPAYGILTIRLGLADKPEIDIISEFGPLITHDSGMDLYTPLDGNEYWLTIPPLQNSALGTVNTLVLEPSLKISPNILTLPIRSGGGDCYTPTYLSDLADDDVKLSSNLVILPSRNLQYVSATYDTSRVEHAIVYYIYSTGRLSSYYYPVKLPIKGDPVSLQIGCFPWGLKLWCHHFCSVIDSGTGKQVTHTGAVGIEITCNSR

SEQ ID NO: 103 - protein, 575 aa, Avian paramyxovirus 10
  MISC_FEATURE: hemagglutinin-neuraminidase
MDSSQMNILDAMDRESSKRTWRGVFRVTTIIMVVTCVVLSAITLSKVAHPQGFDTNELGNGIVDRVSDKITEALTVPNNQIGEIFKIVALDLHVLVSSSQQAIAGQIGMLAESINSILSQNGSASTILSSSPEYAGGIGVPLFSNKLTNGTVIKPITLIEHPSFIPGPTTIGGCTRIPTFHMASSHWCYSHNIIEKGCKDSGISSMYISLGVLQVLKKGTPVFLVTASAVLSDDRNRKSCSIISSRFGCEILCSLVTEAESDDYKSDTPTGMVHGRLYFNGTYREGLVDTETIFRDFSANYPGVGSGEIVEGHIHFPIYGGVKQNTGLYNSLTPYWLDAKNKYDYCKLPYTNQTIQNSYKPPFIHGRFWAQGILSCELDLFNLGNCNLKIIRSDKVMMGAESRLMLVGSKLLMYQRASSWWPLGITQEIDIAELHSSNTTILREVKPILSSKFPRPSYQPNYCTKPSVCPAVCVTGVYTDMWPISITGNISDYAWISHYLDAPTSRQQPRIGIANQYFWIHQTTIFPTNTQSSYSTTTCFRNQVRSRMFCLSIAEFADGVFGEFRIVPLLYELRV

SEQ ID NO: 104 - protein, 593 aa, Tioman virus
  MISC_FEATURE: attachment protein
MWATSESKAPIPANSTLNLVDVPLDEPQTITKHRKQKRTGRLVFRLLSLVLSLMTVILVLVILASWSQKINACATKEGFNSLDLQISGLVKSINSLITEVNQISITTAINLPIKLSDFGKSIVDQVTQMIRQCNAVCKGPGEKPGIQNIRINIPNNFSTYLELNNTVKSIELQRRPALLARPNPIPKSCSRFPSYSVNFGIHCFAHAITDQSCELSDKTYYRLAIGISDKNLSDPSDVKYIGEAFTPMGLQARGCSVISSIYGCYLLCSKSNQGYEADFQTQGFHQMYILFLSRDLKTTLFNDMISSTTVVWNGLYPGEGAGIWHMGYLIFPLWGGIKIGTPASTSILNSTLDLPLVGPSCKSTLEENNLINKDVLFSPYFGESVMVFGFLSCYMLSNVPTHCQVEVLNSSVLGFGSRSQLMDLKGIVYLYIQSAGWYSYTQLFRLSLQSRGYKLTVKQIRRIPISSTTRPGTAPCDVVHNCPYTCATGLFQAPWIVNGDSILDRDVRNLVFVQAWSGNFNTFQKGLISICNQYTCPLTTLLDNDNSIMRSTTTYCYPSLSEYNLQCQSFIEWGGPVGNPIGILEVHYIIKFK

SEQ ID NO: 105 - protein, 604 aa, Dolphin morbillivirus
  MISC_FEATURE: haemagglutinin protein
MSSPRDKVDAFYKDIPRPRNNRVLLDNERVIIERPLILVGVLAVMFLSLVGLLAIAGVRLQKATTNSIEVNRKLSTNLETTVSIEHHVKDVLTPLFKIIGDEVGLRMPQKLTEIMQFISNKIKFLNPDREYDFNDLHWCVNPPDQVKIDYAQYCNHIAAEELIVTKFKELMNHSLDMSKGRIFPPKNCSGSVITRGQTIKPGLTLVNIYTTRNFEVSFMVTVISGGMYGKTYFLKPPEPDDPFEFQAFRIFEVGLVRDVGSREPVLQMTNFMVIDEDEGLNFCLLSVGELRLAAVCVRGRPVVTKDIGGYKDEPFKVVTLGIIGGGLSNQKTEIYPTIDSSIEKLYITSHRGIIRNSKARWSVPAIRSDDKDKMEKCTQALCKSRPPPSCNSSDWEPLTSNRIPAYAYIALEIKEDSGLELDITSNYGPLIIHGAGMDIYEGPSSNQDWLAIPPLSQSVLGVINKVDFTAGFDIKPHTLTTAVDYESGKCYVPVELSGAKDQDLKLESNLVVLPTKDFGYVTATYDTSRSEHAIVYYVYDTARSSSYFFPFRIKARGEPIYLRIECFPWSRQLWCHHYCMINSTVSNEIVVVDNLVSINMSCSR

SEQ ID NO: 106 - protein, 734 aa, Beilong virus
  MISC_FEATURE: attachment glycoprotein
MSQLAAHNLAMSNFYGTHQGDLSGSQKGEEQQVQGVIRYVSMIVSLLSLFTIIALNVTNIIYMTESGGTMQSIKTAQGSIDGSMREISGVIMEDVKPKTDLINSMVSYNIPAQLSMIHQIIKNDVPKQCTPSFMFNNTICPLAENPTHSRYFEEVNLDSISECSGPDMHLGLGVNPEFIEFPSFAPGSTKPGSCVRLPSFSLSTTVFAYTHTIMGHGCSELDVGDHYFSVGRIADAGHEIPQFETISSWFINDKINRRSCTVAAGAMEAWMGCVIMTETFYDDRNSLDTGKLTISYLDVFGRKKEWIYTRSEILYDYTYTSVYFSVGSGVVVGDTVYFLIWGSLSSPIEETAYCFAPDCSNYNQRMCNEAQRPSKFGHRQMVNGILKFKTTSTGKPLLSVGTLSPSVVPFGSEGRLMYSEITKIIYLYLRSTSWHALPLTGLFVLGPPTSISWIVQRAVSRPGEFPCGASNRCPKDCVTGVYTDLFPLGSRYEYAATVYLNSETYRVNPTLALINQTNIIASKKVTTESQRAGYTTTTCFVFKLRVWCISVVELAPSTMTAYEPIPFLYQLDLTCKGKNGSLAMRFAGKEGTYKSGRYKSPRNECFFEKVSNKYYFIVSTPEGIQPYEIRDLTPDRMPHIIMYISDVCAPALSAFKKLLPAMRPITTLTIGNWQFRPVEVSGGLRVNIGRNLTKEGDLTMSAPEDPGSNTFPGNHIPGNGILDAGYYTVEYPKE

SEQ ID NO: 107 - protein, 582 aa, Mapuera virus
  MISC_FEATURE: attachment protein
MASLQSEPGSQKPHYQSDDQLVKRTWRSFFRFSVLVVTITSLALSIITLIGVNRISTAKQISNAFAAIQANILSSIPDIRPINSLLNQLVYTSSVTLPLRISSLESNVLAAIQEACTYRDSQSSCSATMSVMNDQRYIEGIQVYSGSFLDLQKHTLSPPIAFPSFIPTSTTTVGCTRIPSFSLTKTHWCYTHNYIKTGCRDATQSNQYIALGTIYTDPDGTPGFSTSRSQYLNDGVNRKSCSISAVPMGCALYCFISVKEEVDYYKGTVPPAQTLILFFFNGTVHEHRIVPSSMNSEWVMLSPGVGSGVFYNNYIIFPLYGGMTKDKAEKRGELTRFFTPKNSRSLCKMNDSVFSNAAQSAYYPPYFSSRWIRSGLLACNWNQIITTNCEILTFSNQVMMMGAEGRLILINDDLFYYQRSTSWWPRPLVYKLDIELNYPDSHIQRVDQVEVTFPTRPGWGGCVGNNFCPMICVSGVYQDVWPVTNPVNTTDSRTLWVGGTLLSNTTRENPASVVTSGGSISQTVSWFNQTVPGAYSTTTCFNDQVQGRIFCLIIFEVGGGLLGEYQIVPFLKELKYQGAVHA

SEQ ID NO: 108 - protein, 657 aa, Nariva virus
  MISC_FEATURE: attachment protein
MAPINYPASYYTNNAERPVVITTKSTESKGQRPLPLGNARFWEYFGHVCGTLTFCMSLIGIIVGIIALANYSSDKDWKGRIGGDIQVTRMATEKTVKLILEDTTPKLRNILDSVLFQLPKMLASIASKINTQTPPPPTTSGHSTALATQCSSNCENRPEIGYDYLRQVEQSLQRITNISIQLLEASEIHSMAGAYPNALYKIRTQDSWSVTAKECPLQAFQPNLNLIPAMIGTATGALIRNCVRQPVIVVDDGVYMLTYLAMRGSCQDHQKSVRHFEMGVITSDPFGDPVPTPLRHWTKRALPAYDGCALAVKGHAGFALCTETSVGPLRDRTAKRKPNIVLFKASLVGELSERVIPPQSWLSGFSFFSVYTVAGKGYAYHSKFHAFGNVVRVGQSEYQAKCRGTGCPTANQDDCNTAQRVSQEDNTYLHQAILSVDIDSVIDPEDVVYVIERDQYYQASAGDLYRVPETGEILYNLHNGGWSNEVQVGRIQPSDRFYMREIQLTSTRVPAPNGCNRVKGCPGGCVAVISPAFTPMHPEFNVGVGIFPMNQPHNPSIMHVQQQTELFWKPIVGGNITLHESSIACYSTVPPNPSYDLCIGVMTLLLHQGQLPQFQALSWYQPTMCNGNAPQNRRALIPVIVEDSKAMSVSSDAPRTP

SEQ ID NO: 109 - protein, 632 aa, Bat Paramyxovirus Eid_hel/GH-M74a/GHA/2009
  MISC_FEATURE: glycoprotein
MPQKTVEFINMNSPLERGVSTLSDKKTLNQSKITKQGYFGLGSHSERNWKKQKNQNDHYMTVSTMILEILVVLGIMFNLIVLTMVYYQNDNINQRMAELTSNITVLNLNLNQLTNKIQREIIPRITLIDTATTITIPSAITYILATLTTRISELLPSINQKCEFKTPTLVLNDCRINCTPPLNPSDGVKMSSLATNLVAHGPSPCRNFSSVPTIYYYRIPGLYNRTALDERCILNPRLTISSTKFAYVHSEYDKNCTRGFKYYELMTFGEILEGPEKEPRMFSRSFYSPTNAVNYHSCTPIVTVNEGYFLCLECTSSDPLYKANLSNSTFHLVILRHNKDEKIVSMPSFNLSTDQEYVQIIPAEGGGTAESGNLYFPCIGRLLHKRVTHPLCKKSNCSRTDDESCLKSYYNQGSPQHQVVNCLIRIRNAQRDNPTWDVITVDLTNTYPGSRSRIFGSFSKPMLYQSSVSWHTLLQVAEITDLDKYQLDWLDTPYISRPGGSECPFGNYCPTVCWEGTYNDVYSLTPNNDLFVTVYLKSEQVAENPYFAIFSRDQILKEFPLDAWISSARTTTISCFMFNNEIWCIAALEITRLNDDIIRPIYYSFWLPTDCRTPYPHTGKMTRVPLRSTYNY

SEQ ID NO: 110 - protein, 569 aa, Avian paramyxovirus 7
  MISC_FEATURE: hemagglutinin-neuraminidase
MESIGKGTWRTVYRVLTILLDVVIIILSVIALISLGLKPGERIINEVNGSIHNQLVPLSGITSDIQAKVSSIYRSNLLSIPLQLDQINQAISSSARQIADTINSFLALNGSGTFIYTNSPEFANGFNRAMFPTLNQSLNMLTPGNLIEFTNFIPTPTTKSGCIRIPSFSMSSSHWCYTHNIIASGCQDHSTSSEYISMGVVEVTDQAYPNFRTTLSITLADNLNRKSCSIAATGFGCDILCSVVTETENDDYQSPEPTQMIYGRLFFNGTYSEMSLNVNQMFADWVANYPAVGSGVELADFVIFPLYGGVKITSTLGASLSQYYYIPKVPTVNCSETDAQQIEKAKASYSPPKVAPNIWAQAVVRCNKSVNLANSCEILTFNTSTMMMGAEGRLLMIGKNVYFYQRSSSYWPVGIIYKLDLQELTTFSSNQLLSTIPIPFEKFPRPASTAGVCSKPNVCPAVCQTGVYQDLWVLYDLGKLENTTAVGLYLNSAVGRMNPFIGIANTLSWYNTTRLFAQGTPASYSTTTCFKNTKIDTAYCLSILELSDSLLGSWRITPLLYNITLSIMS

SEQ ID NO: 111 - protein, 588 aa, Tuhoko virus 2
  MISC_FEATURE: hemagglutinin-neuraminidase
MPPVPTVSQSIDEGSFTDIPLSPDDIKHPLSKKTCRKLFRIVTLIGVGLISILTIISLAQQTGILRKVDSSDFQSYVQESFKQVLNLMKQFSSNLNSLIEITSVTLPFRIDQFGTDIKTQVAQLVRQCNAVCRGPIKGPTTQNIVYPALYETSLNKTLETKNVRIQEVRQEVDPVPGPGLSNGCTRNPSFSVYHGVWCYTHATSIGNCNGSLGTSQLFRIGNVLEGDGGAPYHKSLATHLLTTRNVSRQCSATASYYGCYFICSEPVLTERDDYETPGIEPITIFRLDPDGNWVVFPNINRFTEYSLKALYPGIGSGVLFQGKLIFPMYGGIDKERLSALGLGNIGLIERRMADTCNHTEKELGRSFPGAFSSPYYHDAVMLNFLLICEMIENLPGDCDLQILNPTNMSMGSESQLSVLDNELFLYQRSASWWPYTLIYRLNMRYTGKYLKPKSIIPMVIKSNTRPGYEGCNHERVCPKVCVTGVFQAPWILSIGRDHKERVSNVTYMVAWSMDKSDRTYPAVSVCGSDTCKLTVPLGDSKVHSAYSVTRCYLSRDHMSAYCLVIFELDARPWAEMRIQSFLYKLILT

SEQ ID NO: 112 - protein, 582 aa, Tuhoko virus 3
  MISC_FEATURE: hemagglutinin-neuraminidase
MHNRTQSVSSIDTSSDVYLPRRKKAVTKFTFKKIFRVLILTLLLSIIIIIAVIFPKIDHIRETCDNSQILETITNQNSEIKNLINSAITNLNVLLTSTTVDLPIKLNNFGKSIVDQVTMMVRQCNAVCRGPGDRPTQNIELFKGLYHTSPPSNTSTKLSMITEASNPDDIVPRPGKLLGCTRFPSFSVHYGLWCYGHMASTGNCSGSSPSVQIIRIGSIGTNKDGTPKYVIIASASLPETTRLYHCSVTMTSIGCYILCTTPSVSETDDYSTMGIEKMSISFLSLDGYLTQLGQPTGLDNQNLYALYPGPGSGVIFRDFLIFPMMGGIRLMDAQKMLNRNITYRGFPPSETCTESELKLKQEVANMLTSPYYGEVLVLNFLYVCSLLDNIPGDCSVQLIPPDNMTLGAESRLYVLNGSLIMYKRGSSWWPYTELYQINYRVNNRAFRVRESVRINTTSTSRPGVQGCNLEKVCPKVCVSGIYQSPGIISAPVNPTRQEEGLLYFLVWTSSMSSRTGPLSSLCDHSTCRITYPIGDDTIFIGYTDSSCFMSSIKEGIYCIAFLELDNQPYSMMAIRSLSYIIN

SEQ ID NO: 113 - protein, 625 aa, Mojiang virus
  MISC_FEATURE: attachment glycoprotein
MATNRDNTITSAEVSQEDKVKKYYGVETAEKVADSISGNKVFILMNTLLILTGAIITITLNITNLTAAKSQQNMLKIIQDDVNAKLEMFVNLDQLVKGEIKPKVSLINTAVSVSIPGQISNLQTKFLQKYVYLEESITKQCTCNPLSGIFPTSGPTYPPTDKPDDDTTDDDKVDTTIKPIEYPKPDGCNRTGDHFTMEPGANFYTVPNLGPASSNSDECYTNPSFSIGSSIYMFSQEIRKTDCTAGEILSIQIVLGRIVDKGQQGPQASPLLVWAVPNPKIINSCAVAAGDEMGWVLCSVTLTAASGEPIPHMFDGFWLYKLEPDTEVVSYRITGYAYLLDKQYDSVFIGKGGGIQKGNDLYFQMYGLSRNRQSFKALCEHGSCLGTGGGGYQVLCDRAVMSFGSEESLITNAYLKVNDLASGKPVIIGQTFPPSDSYKGSNGRMYTIGDKYGLYLAPSSWNRYLRFGITPDISVRSTTWLKSQDPIMKILSTCTNTDRDMCPEICNTRGYQDIFPLSEDSEYYTYIGITPNNGGTKNFVAVRDSDGHIASIDILQNYYSITSATISCFMYKDEIWCIAITEGKKQKDNPQRIYAHSYKIRQMCYNMKSATVTVGNAKNITIRRY

SEQ ID NO: 114 - protein, 614 aa, Avian paramyxovirus 12
  MISC_FEATURE: hemagglutinin-neuraminidase
MESATSQVSFENDKTSDRRTWRAVFRVLMIILALSSLCVTVAALIYSAKAAIPGNIDASEQRILSSVEAVQVPVSRLEDTSQKIYRQVILEAPVTQLNMETNILNAITSLSYQIDASANSSGCGAPVHDSDFTGGVGRELLQEAEVNLTIIRPSKFLEHLNFIPAPTTGNGCTRIPSFDLGQTHWCYTHNVVLNGCRDRGHSFQYVALGILRTSATGSVFLSTLRSVNLDDDRNRKSCSVSATPIGCEMLCSLVTETEEGDYDSIDPTPMVHGRLGFDGKYREVDLSEKEIFADWRANYPAVGGGAFFGNRVWFPVYGGLKEGTQSERDAEKGYAIYKRFNNTCPDDNTTQIANAKASYRPSRFGGRFIQQGILSFKVEGNLGSDPILSLTDNSITLMGAEARVMNIENKLYLYQRGTSWFPSALVYPLDVANTAVKVRAPYIFDKFTRPGGHPCSASSRCPNVCVTGVYTDAYPLVFSRSHDIVAVYGMQLAAGTARLDPQAAIWYGNEMSTPTKVSSSTTKAAYTTSTCFKVTKTKRIYCISIAEIGNTLFGEFRIVPLLIEVQKTPLTRRSELRQQMPQPPIDLVIDNPFCAPSGNLSRKNAIDEYANSWP

SEQ ID NO: 115 - protein, 577 aa, Avian paramyxovirus 3
  MISC_FEATURE: hemagglutinin
MEPTGSKVDIVPSQGTKRTCRTFYRLLILILNLIIIILTIISIYVSISTDQHKLCNNEADSLLHSIVEPITVPLGTDSDVEDELREIRRDTGINIPIQIDNTENIILTTLASINSNIARLHNATDESPTCLSPVNDPRFIAGINKITKGSMIYRNFSNLIEHVNFIPSPTTLSGCTRIPSFSLSKTHWCYSHNVISTGCQDHAASSQYISIGIVDTGLNNEPYLRTMSSRLLNDGLNRKSCSVTAGAGVCWLLCSVVTESESADYRSRAPTAMILGRFNFYGDYTESPVPASLFSGRFTANYPGVGSGTQLNGTLYFPIYGGVVNDSDIELSNRGKSFRPRNPTNPCPDPEVTQSQRAQASYYPTRFGRLLIQQAILACRISDTTCTDYYLLYFDNNQVMMGAEARIYYLNNQMYLYQRSSSWWPHPLFYRFSLPHCEPMSVCMITDTHLILTYATSRPGTSICTGASRCPNNCVDGVYTDVWPLTEGTTQDPDSYYTVFLNSPNRRISPTISIYSYNQKISSRLAVGSEIGAAYTTSTCFSRTDTGALYCITIIEAVNTIFGQYRIVPILVQLISD

SEQ ID NO: 116 - protein, 620 aa, Salem virus
  MISC_FEATURE: attachment glycoprotein
MKAMHYYKNDFADPGTNDNSSDLTTNPFISNQIKSNLSPPVLAEGHLSPSPIPKFRKILLTISFVSTIVVLTVILLVLTIRILTIIEASAGDEKDIHTILSSLLNTFMNEYIPVFKNLVSIISLQIPQMLIDLKTSSTQMMQSLKTFPRDLETLSTVTQSVAVLLEKAKSTIPDINKFYKNVGKVTFNDPNIKVLTLEVPAWLPIVRQCLKQDFRQVISNSTGFALIGALPSQLFNEFEGYPSLAIVSEVYAITYLKGVMFENQENFLYQYFEIGTISPDGYNKPYFLRHTSVMLSTFKLSGKCTAAVDYRGGIFLCTPSPKIPKILQNPPDLPTLTVVSIPFDGRYTIRNISLMLTDEADIIYDLDTLQGRGVLQAMRFYALVRVISSSSPRHFPFCKNSWCPTADDKICDQSRRLGADGNYPVMYGLISIPAHSSYQGNVSLKLIDPKYYAYTRDASLFYNSMTDTYHYSFGTRGWVSRPIIGELLLGDDIVLTRYTVRSVSRATAGDCTTVSMCPQACSGGMNSIFYPLNFDKPQVTGVAIRQYERQQEGIIVVTMNDHYYYSVPIIKNGTLLISSVTDCFWLMGDLWCMSLMEKNNLPLGVRSLAHLTWNIHWSCS

SEQ ID NO: 117 - protein, 579 aa, Avian paramyxovirus 9
  MISC_FEATURE: hemagglutinin-neuraminidase
MESGISQASLVNDNIELRNTWRTAFRVVSLLLGFTSLVLTACALHFALNAATPADLSSIPVAVDQSHHEILQTLSLMSDIGNKIYKQVALDSPVALLNTESTLMSAITSLSYQINNAANNSGCGAPVHDKDFINGVAKELFVGSQYNASNYRPSRFLEHLNFIPAPTTGKGCTRIPSFDLAATHWCYTHNVILNGCNDHAQSYQYISLGILKVSATGNVFLSTLRSINLDDDENRKSCSISATPLGCDLLCAKVTEREEADYNSDAATRLVHGRLGFDGVYHEQALPVESLFSDWVANYPSVGGGSYFDNRVWFGVYGGIRPGSQTDLLQSEKYAIYRRYNNTCPDNNPTQIERAKSSYRPQRFGQRLVQQAILSIRVEPSLGNDPKLSVLDNTVVLMGAEARIMTFGHVALMYQRGSSYFPSALLYPLSLTNGSAAASKPFIFEQYTRPGSPPCQATARCPNSCVTGVYTDAYPLFWSEDHKVNGVYGMMLDDITSRLNPVAAIFDRYGRSRVTRVSSSSTKAAYTTNTCFKVVKTKRVYCLSIAEIENTLFGEFRITPLLSEIIFDPNLEPSDTSRN

SEQ ID NO: 118 - protein, 595 aa, Achimota virus 1
  MISC_FEATURE: attachment protein
MATNLSTITNGKFSQNSDEGSLTELPFFEHNRKVATTKRTCRFVFRSVITLCNLTILIVTVVVLFQQAGFIKRTESNQVCETLQNDMHGVVTMSKGVITTLNNLIEITSVNLPFQMKQFGQGIVTQVTQMVRQCNAVCKGPTIGPDIQNIVYPASYESMIKHPVNNSNILLSEIRQPLNFVPNTGKLNGCTRTPSFSVYNGFWCYTHAESDWNCNGSSPYMQVFRVGVVTSDYDYNVIHKTLHTKTSRLANVTYQCSTISTGYECYFLCSTPNVDEITDYKTPGIESLQIYKIDNRGTFAKFPITDQLNKELLTALYPGPGNGVLYQGRLLFPMHGGMQSSELNKVNLNNTVLSQFNDNKGCNATEIKLESEFPGTFTSPYYSNQVMLNYILICEMIENLPGNCDLQIVAPKNMSMGSESQLYSINNKLYLYQRSSSRWPYPLIYEVGTRLTNRQFRLRAINRFLIKSTTRPGSEGCNIYRVCPKVCVTGVYQAPWILHVSKAGSQSIAKVLYAVAWSKDHMSRKGPLFSICDNDTCFLTKSLASEHVHSGYSITRCYLENSERHIICVVIMELDASPWAEMRIQSVIYNITLPS

SEQ ID NO: 119 - protein, 583 aa, Achimota virus 2
  MISC_FEATURE: attachment protein
MDNSMSISTISLDAQPRIWSRHESRRTWRNIFRITSLVLLGVTVIICIWLCCEVARESELELLASPLGALIMAINTIKSSVVKMTTELNQVTFTTSIILPNKVDQFGQNVVSQVAQLVKQCNAVCRGHQDTPELEQFINQKNPTWILQPNYTTKLTNLHEIDSIIPLVDYPGFSKSCTRFPSFSEGSKFWCFTYAVVKEPCSDISSSIQVVKYGAIKANHSDGNPYLVLGTKVLDDGKFRRGCSITSSLYGCYLLCSTANVSEVNDYAHTPAYPLTLELISKDGITTDLSPTYTVQLDKWSALYPGIGSGVIFKGYLMFPVYGGLPFKSPLISASWVGPGNKWPVDFSCSEDQYSTFNFSNPYSALYSPHFSNNIVVSALFVCPLNENLPYSCEVQVLPQGNLTIGAEGRLYVIDQDLYYYQRSTSWWPYLQLYKLNIRITNRVFRVRSLSLLPIKSTTRPGYGNCTYFKLCPHICVTGVYQSPWLISIRDKRPHEEKNILYFIGWSPDEQIRQNPLVSLCHETACFINRSLATNKTHAGYSESHCVQSFERNKLTCTVFYELTAKPWAEMRVQSLLFQVDFL

SEQ ID NO: 120 - protein, 580 aa, Tuhoko virus 1
  MISC_FEATURE: hemagglutinin-neuraminidase
MDSRSDSFTDIPLDNRIERTVTSKKTWRSIFRVTAIILLIICVVVSSISLNQHNDAPLNGAGNQATSGFMDAIKSLEKLMSQTINELNQVVMTTSVQLPNRITKFGQDILDQVTQMVRQCNAVCRGPGVGPSIQNYVIQGHAPTVSFDPISAEYQKFVFGITEKTLITAYHNPWECLRFPSQHLFDTTWCVSYQILTQNCSDHGPRITVIQLGEIMIANNLSTVFRDPVIKYIRHHIWLRSCSVVAYYSQCTIFCTSTNKSEPSDYADTGYEQLFLATLQSDGTFTEHSMHGVNIVHQWNAIYGGVGNGVIIGRNMLIPLYGGINYYDHNTTIVQTVDLRPYPIPDSCSQTDNYQTNYLPSMFTNSYYGTNLVVSGYLSCRLMAGTPTSCSIRVIPIENMTMGSEGQFYLINNQLYYYKRSSNWIRDTQVYLLSYSDKGNIIEITSAERYIFKSVTSPDEGDCVTNHGCPSNCIGGLFQAPWILNDFKLCGSNITCPKIVTVWADQPDKRSNPMLSIAETDKLLLHKSYINYHTAVGYSTVLCFDSPKLNLKTCVVLQELMSDDKLLIRISYSIVSIMVE

SEQ ID NO: 121 - protein, 607 aa, Phocine distemper virus
  MISC_FEATURE: hemagglutinin protein
MFSHQDKVGAFYKNNARANSSKLSLVTDEVEERRSPWFLSILLILLVGILILLAITGIRFHQVVKSNLEFNKLLIEDMEKTKAVHHQVKDVLTPLFKIIGDEVGLRLPQKLNEIKQFIVQKTNFFNPNREFDFRELHWCINPPSKVKVNFTQYCEITEFKEATRSVANSILLLTLYRGRDDIFPPYKCRGATTSMGNVFPLAVSLSMSLISKPSEVINMLTAISEGIYGKTYLLVTDDTEENFETPEIRVFEIGFINRWLGDMPLFQTTNYRIISNNSNTKICTIAVGELALASLCTKESTILLNLGDEESQNSVLVVILGLFGATHMDQLEEVIPVAHPSIEKIHITNHRGFIKDSVATWMVPALALSEQGEQINCLRSACKRRTYPMCNQTSWEPFGDKRLPSYGRLTLSLDVSTDLSINVSVAQGPIIFNGDGMDYYEGTLLNSGWLTIPPKNGTILGLINQASKGDQFIVTPHILTFAPRESSTDCHLPIQTYQIQDDDVLLESNLVVLPTQSFEYVVATYDVSRSDHAIVYYVYDPARTVSYTYPFRLRTKGRPDILRIECFVWDGHLWCHQFYRFQLDATNSTSVVENLIRIRFSCDRLDP

SEQ ID NO: 122 - protein, 574 aa, Caprine parainfluenza virus 3
  MISC_FEATURE: hemagglutinin-neuraminidase
MEYWGHTNNPDKINRKVGVDQVRDRSKTLKIITFIISMMTSIMSTVALILILIMFIQNNNNNRIILQELRDETDAIEARIQKASNDIGVSIQSGINTRLLTIQNHVQNYIPLALTQQVSSLRESINDVITKREETQSKMPIQRMTHDDGIEPLIPDNFWKCPSGIPTISASPKIRLIPGPGLLATSTTINGCIRLPSLVINNLIYAYTSNLITQGCQDIGKSYQVLQIGIITINSDLVPDLNPRITHTFDIDDNRKSCSLALRNADVYQLCSTPKVDERSDYSSIGIEDIVLDIVTSEGTVSTTRFTNNNITFDKPYAALYPSVGPGIYYDNKIIFLGYGGLEHEENGDVICNITGCPGKTQHDCNQASYSPWFSNRRMVNAIILVNKGLNKVPSLQVWTIPMRQNYWGSEGRLLLLGNKIYIYTRSTSWHSKLQLGTLDISNYNDIRIRWTHHDVLSRPGSEECPWGNTCPRGCITGVYNDAYPLNPSGSVVSSVILDSRTSRENPIITYSTDTSRVNELAIRNNTLSAAYTTTNCVTHYGKGYCFHIIEINHKSLNTLQPMLFKTEIPKSCN

SEQ ID NO: 123 - protein, 414 aa, Avian metapneumovirus
  MISC_FEATURE: attachment glycoprotein
MGSELYIIEGVSSSEIVLKQVLRRSKKILLGLVLSALGLTLTSTIVISICISVEQVKLRQCVDTYWAENGSLHPGQSTENTSTRGKTTTKDPRRLQATGAGKFESCGYVQVVDGDMHDRSYAVLGGVDCLGLLALCESGPICQGDTWSEDGNFCRCTFSSHGVSCCKKPKSKATTAQRNSKPANSKSTPPVHSDRASKEHNPSQGEQPRRGPTSSKTTIASTPSTEDTAKPTISKPKLTIRPSQRGPSGSTKAASSTPSHKTNTRGTSKTTDQRPRTGPTPERPRQTHSTATPPPTTPIHKGRAPTPKPTTDLKVNPREGSTSPTAIQKNPTTQSNLVDCTLSDPDEPQRICYQVGTYNPSQSGTCNIEVPKCSTYGHACMATLYDTPFNCWRRTRRCICDSGGELIEWCCTSQ

SEQ ID NO: 124 - protein, 665 aa, Tupaia paramyxovirus
  MISC_FEATURE: hemagglutinin
MDYHSHTTQTGSNETLYQDPLQSQSGSRDTLDGPPSTLQHYSNPPPYSEEDQGIDGPQRSQPLSTPHQYDRYYGVNIQHTRVYNHLGTIYKGLKLAFQILGWVSVIITMIITVTTLKKMSDGNSQDSAMLKSLDENFDAIQEVANLLDNEVRPKLGVTMTQTTFQLPKELSEIKRYLLRLERNCPVCGTEATPQGSKGNASGDTAFCPPCLTRQCSEDSTHDQGPGVEGTSRNHKGKINFPHILQSDDCGRSDNLIVYSINLVPGLSFIQLPSGTKHCIIDVSYTFSDTLAGYLIVGGVDGCQLHNKAIIYLSLGYYKTKMIYPPDYIAIATYTYDLVPNLRDCSIAVNQTSLAAICTSKKTKENQDFSTSGVHPFYIFTLNTDGIFTVTVIEQSQLKLDYQYAALYPATGPGIFIGDHLVFLMWGGLMTKAEGDAYCQASGCNDAHRTSCNIAQMPSAYGHRQLVNGLLMLPIKELGSHLIQPSLETISPKINWAGGHGRLYYNWEINTTYIYIEGKTWRSRPNLGIISWSKPLSIRWIDHSVARRPGARPCDSANDCPEDCLVGGYYDMFPMSSDYKTAITIIPTHHQWPSSPALKLFNTNREVRVVMILRPPNNVKKTTISCIRIMQTNWCLGFIIFKEGNNAWGQIYSYIYQVESTCPNTK

SEQ ID NO: 125 - protein, 585 aa, Avian metapneumovirus
  MISC_FEATURE: attachment glycoprotein
MEVKVENVGKSQELKVKVKNFIKRSDCKKKLFALILGLVSFELTMNIMLSVMYVESNEALSLCRIQGTPAPRDNKTNTENATKETTLHTTTTTRDPEVRETKTTKPQANEGATNPSRNLTTKGDKHQTTRATTEAELEKQSKQTTEPGTSTQKHTPTRPSSKSPTTTQAIAQLTTPTTPKASTAPKNRQATTKKTETDTTTASRARNTNNPTETATTTPKATTETGKSKEGPTQHTTKEQPETTAGETTTPQPRRTASRPAPTTKIEEEAETTKTRTTKSTQTSTGPPRPTGGAPSGAATEGSGRAAAAGGPSAASAGGRRRTEAAAERDRRTRAGAGPTAGGARARTAAASERGADTAGSAGGGPGGDGATGGLSGGAPAEREDASGGTAAAGPGDGTEADGRAPPAAALAGRTTESAAGAAGDSGRAGTAGWGSAADGRSTGGNAAAEAGAAQSGRAAPRQPSGGTAPESTAPPNSGGSGRADAAPTEEVGVGSGLWRGRYVCGPCGESVPEHPMNPCFGDGTAWICSDDGGSLPAGCYDGGTDGVVCCGVCGGNSCCCGRVECTCGGGAGLLSCCCGSYSWS

SEQ ID NO: 126 - protein, 577 aa, Avian paramyxovirus 3
  MISC_FEATURE: hemagglutinin-neuraminidase protein
MESPPSGKDAPAFREPKRTCRLCYRATTLSLNLTIVVLSIISIYVSTQTGANNSCVNPTIVTPDYLTGSTTGSVEDLADLESQLREIRRDTGINLPVQIDNTENLILTTLASINSNLRFLQNATTESQTCLSPVNDPRFVAGINRIPAGSMAYNDFSNLIEHVNFIPSPTTLSGCTRIPSFSLSKTHWCYTHNVISNGCLDHAASSQYISIGIVDTGLNNEPYFRTMSSKSLNDGLNRKSCSVTAAANACWLLCSVVTEYEAADYRSRTPTAMVLGRFDFNGEYTEIAVPSSLFDGRFASNYPGVGSGTQVNGTLYFPLYGGVLNGSDIETANKGKSFRPQNPKNRCPDSEAIQSFRAQDSYYPTRFGKVLIQQAIIACRISNKSCTDFYLLYFDNNRVMMGAEARLYYLNNQLYLYQRSSSWWPHPLFYSISLPSCQALAVCQITEAHLTLTYATSRPGMSICTGASRCPNNCVDGVYTDVWPLTKNDAQDPNLFYTVYLNNSTRRISPTISLYTYDRRIKSKLAVGSDIGAAYTTSTCFGRSDTGAVYCLTIMETVNTIFGQYRIVPILLRVTSR

SEQ ID NO: 127 - protein, 585 aa, Avian metapneumovirus
  MISC_FEATURE: attachment glycoprotein
MEVKVENVGKSQELKVKVKNFIKRSDCKKKLFALILGLVSFELTMNIMLSVMYVESNEALSLCRIQGTPAPRDNKTNTENATKETTLHTTTTTRDPEVRETKTTKPQANEGATNPSRNLTTKGDKHQTTRATTEAELEKQSKQTTEPGTSTQKHTPARPSSKSPTTTQATAQPTTPTAPKASTAPKNRQATTKKTETDTTTASRARNTNNPTETATTTPKATTETGKGKEGPTQHTTKEQPETTARETTTPQPRRTASRPAPTTKIEEEAETTKTRTTKNTQTSTGPPRPTRSTPSKTATENNKRTTTTKRPNTASTDSRQQTRTTAEQDQQTQTRAKPTTNGAHPQTTTTPEHNTDTTNSTKGSPKEDKTTRDPSSKTPTEQEDASKGTAAANPGGSAEADRRAPPATTPTGRTTESAAGTTGDDSGAETTRRRSAADRRPTGGSTAAEAGTAQSGRATPKQPSGGTAAGNTAPPNNESSGRADAAPAEEAGVGPSIRRGRHACGPRRESAPEHPTNPCPGDGTAWTRSDGGGNLPAGRHDSGADGAARRGARGGNPRRRGRAERTRGGGAGPPSCRCGSHNRS

SEQ ID NO: 128 - protein, 389 aa, Avian metapneumovirus type D
  MISC_FEATURE: attachment glycoprotein
MGAKLYAISGASDAQLMKKTCAKLLEKVVPIIILAVLGITGTTTIALSISISIERAVLSDCTTQLRNGTTSGSLSNPTRSTTSTAVTTRDIRGLQTTRTRELKSCSNVQIAYGYLHDSSNPVLDSIGCLGLLALCESGPFCQRNYNPRDRPKCRCTLRGKDISCCKEPPTAVTTSKTTPWGTEVHPTYPTQVTPQSQPATMAHQTATANQRSSTTEPVGSQGNTTSSNPEQQTEPPPSPQHPPTTTSQDQSTETADGQEHTPTRKTPTATSNRRSPTPKRQETGRATPRNTATTQSGSSPPHSSPPGVDANMEGQCKELQAPKPNSVCKGLDIYREALPRGCDKVLPLCKTSTIMCVDAYYSKPPICFGYNQRCFCMETFGPIEFCCKS

SEQ ID NO: 129 - protein, 197 aa, Respiratory syncytial virus
  MISC_FEATURE: attachment glycoprotein
MSKNKNQRTARTLEKTWDTLNHLIVISSCLYKLNLKSIAQIALSVLAMIISTSLIIAAIIFIISANHKVTLTTVTVQTIKNHTEKNITTYLTQVSPERVSPSKQPTTTPPIHTNSATISPNTKSEIHHTTAQTKGRTSTPTQNNKPNTKPRPKNPPKKDDYHFEVFNFVPCSICGNNQLCKSICKTIPSNKPRKNQP

SEQ ID NO: 130 - protein, 580 aa, Avian paramyxovirus 14
  MISC_FEATURE: hemagglutinin-neuraminidase protein
MEGSRTVIYQGDPNEKNTWRLVFRTLTLILNLAILSVTIASIIITSKITLSEVTTLKTEGVEEVITPLMATLSDSVQQEKMIYKEVAISIPLVLDKIQTDVGTSVAQITDALRQIQGVNGTQAFALSNAPEYSGGIEVPLFQIDSFVNKSMSISGLLEHASFIPSPTTLHGCTRIPSFHLGPRHWCYTHNIIGSRCRDEGFSSMYISIGAITVNRDGNPLFITTASTILADDNNRKSCSIIASSYGCDLLCSIVTESENDDYANPNPTKMVHGRFLYNGSYVEQALPNSLFQDKWVAQYPGVGSGITTHGKVLFPIYGGIKKNTQLFYELSKYGFFAHNKELECKNMTEEQIRDIKAAYLPSKTSGNLFAQGIIYCNISKLGDCNVAVLNTSTTMMGAEGRLQMMGEYVYYYQRSSSWWPVGIVYKKSLAELMNGINMEVLSFEPIPLSKFPRPTWTAGLCQKPSICPDVCVTGVYTDLFSVTIGSTTDKDTYFGVYLDSATERKDPWVAAADQYEWRNRVRLFESTTEAAYTTSTCFKNTVNNRVFCVSIVELRENLLGDWKIVPLLFQIGVSQGPPPK

SEQ ID NO: 131 - protein, 1046 aa, Beilong virus
  MISC_FEATURE: attachment glycoprotein
MSQLAAHNLAMSNFYGTHQGDLSGSQKGEEQQVQGVIRYVSMIVGLLSLFTIIALNVTNIIYMTESGGTMQSIKTAQGSIDGSMREISGVIMEDVKPKTDLINSMVSYNIPAQLSMIHQIIKNDVLKQCTPSFMFNNTICPLAENPTHSRYFEEVNLDSISECSGPDMHLGLGVNPEFIEFPSFAPGSTKPGSCVRLPSFSLSTTVFAYTHTIMGHGCSELDVGDHYFSVGRIADAGHEIPQFETISSWFINDKINRRSCTVAAGAMEAWMGCVIMTETFYDDLNSLDTGKLTISYLDVFGRKKEWIYTRSEILYDYTYTSVYFSVGSGVVVGDTVYFLIWGSLSSPIEETAYCFAPDCSNYNQRMCNEAQRPSKFGHRQMVNGILKFKTTSTGKPLLSVGTLSPSVVPFGSEGRLMYSEITKIIYLYLRSTSWHALPLTGLFVLGPPTSISWIVQRAVSRPGEFPCGASNRCPKDCVTGVYTDLFPLGSRYEYAATVYLNSETYRVNPTLALINQTNIIASKKVTTESQRAGYTTTTCFVFKLRVWCISVVELAPSTMTAYEPIPFLYQLDLTCKGKNGSLAMRFTGKEGTYKSGRYKSPRNECFFEKVSNKYYFIVSTPEGIQPYEIRDLTPDRMPHIIMYISDVCAPALSAFKKLLPAMRPITTLTIGNWQFRPVEVSGGLRVSIGRNLTKEGDLTMSAPEDPGSNTFPGGHIPGNGLFDAGYYTVEYPKEWKQTTPKPSEGGNIIDKNKTPVIPSRDNPTSDSSIPHRESIEPVRPTREVLKSSDYVTIVSTDSGSGSGDFATGVPWTGVSPKAPQNGINLPGTELPHPTVLDRINTPAPSDPKVSADSDHTRDTIDPTALSKPLNHDTTGDTDTRINTGTATYGFTPGREATSSGKLANDLTNSTSVPSEAHPSASTSEASKPEKNTDNRVTQDPTSGTAERPTTNAPVDGKHSTQLTDARPNTADPERTSQHSSSTTRDEVKPSLPSTTEASTHQRTEAATPPELVNNTLNPPSTQVRSVRSLMQDAIAQAWNFVRGVTP

SEQ ID NO: 132 - protein, 618 aa, Avian paramyxovirus UPO216
  MISC_FEATURE: hemagglutinin-neuraminidase protein
MERGISEVALANDRTEEKNTWRLIFRITVLVVSVITLGLTAASLVYSMNAAQPADFDGIIPAVQQVGTSLTNSIGGMQDVLDRTYKQVALESPLTLLNMESTIMNAITSLSYKINNGGNSSGCGAPIHDPEYIGGIGKELLIDDNVDVTSFYPSAFKEHLNFIPAPTTGAGCTRIPSFDLSATHYCYTHNVILSGCQDHSHSHQYIALGVLKLSDTGNVFFSTLRSINLDDTANRKSCSISATPLGCDILCSKVTETELEDYKSEEPTPMVHGRLSFDGTYSEKDLDVNNLFSDWTANYPSVGGGSYIGNRVWYAVYGGLKPGSNTDQSQRDKYVIYKRYNNTCPDPEDYQINKAKSSYTPSYFGSKRVQQAILSIAVSPTLGSDPVLTPLSNDVVLMGAEGRVMHIGGYTYLYQRGTSYYSPALLYPLNIQDKSATASSPYKFDAFTRPGSVPCQADARCPQSCVTGVYTDPYPLIFAKDHSIRGVYGMMLNDVTARLNPIAAVFSNISRSQITRVSSSSTKAAYTTSTCFKVIKTNRIYCMSIAEISNTLFGEFRIVPLLVEILSNGGNTARSAGGTPVKESPKGWSDAIAEPLFCTPTNVTRYNADIRRYAYSWP

SEQ ID NO: 133 - protein, 576 aa, Atlantic salmon paramyxovirus
  MISC_FEATURE: hemagglutinin-neuraminidase protein
MPPAPSPVHDPSSFYGSSLFNEDTASRKGTSEEIHLLGIRWNTVLIVLGLILAIIGIGIGASSFSASGITGNTTKEIRLIVEEMSYGLVRISDSVRQEISPKVTLLQNAVLSSIPALVTTETNTIINAVKNHCNSPPTPPPPTEAPLKKHETGMAPLDPTTYWTCTSGTPRFYSSPNATFIPGPSPLPHTATPGGCVRIPSMHIGSEIYAYTSNLIASGCQDIGKSYQNVQIGVLDRTPEGNPEMSPMLSHTFPINDNRKSCSIVTLKRAAYIYCSQPKVTEFVDYQTPGIEPMSLDHINANGTTKTWIYSPTEVVTDVPYASMYPSVGSGVVIDGKLVFLVYGGLLNGIQVPAMCLSPECPGIDQAACNASQYNQYLSGRQVVNGIATVDLMNGQKPHISVETISPSKNWFGAEGRLVYMGGRLYIYIRSTGWHSPIQIGVIYTMNPLAITWVTNTVLSRPGSAGCDWNNRCPKACLSGVYTDAYPISPDYNHLATMILHSTSTRSNPVMVYSSPTNMVNYAQLTTTAQIAGYTTTSCFTDNEVGYCATALELTPGTLSSVQPILVMTKIPKECV

SEQ ID NO: 134 - DNA, 212 bp, artificial sequence
  EF1a core promoter
gggcagagcgcacatcgcccacagtccccgagaagttggggggaggggtcggcaattgaacgggtgcctagagaaggtggcgcggggtaaactgggaaagtgatgtcgtgtactggctccgcctttttcccgagggtgggggagaaccgtatataagtgcagtagtcgccgtgaacgttctttttcgcaacgggtttgccgccagaacacag

SEQ ID NO: 135 - DNA, 1163 bp, artificial sequence
  EF1a
ggctccggtgcccgtcagtgggcagagcgcacatcgcccacagtccccgagaagttggggggaggggtcggcaattgaaccggtgcctagagaaggtggcgcggggtaaactgggaaagtgatgtcgtgtactggctccgcctttttcccgagggtgggggagaaccgtatataagtgcagtagtcgccgtgaacgttctttttcgcaacgggtttgccgccagaacacaggtaagtgccgtgtgtggttcccgcgggcctggcctctttacgggttatggcccttgcgtgccttgaattacttccacctggctccagtacgtgattcttgatcccgagctggagccaggggcgggccttgcgctttaggagccccttcgcctcgtgcttgagttgaggcctggcctgggcgctggggccgccgcgtgcgaatctggtggcaccttcgcgcctgtctcgctgctttcgataagtctctagccatttaaaatttttgatgacctgctgcgacgctttttttctggcaagatagtcttgtaaatgcgggccaggatctgcacactggtatttcggtttttgggcccgcggccggcgacggggcccgtgcgtcccagcgcacatgttcggcgaggcggggcctgcgagcgcggccaccgagaatcggacgggggtagtctcaagctggccggcctgctctggtgcctggcctcgcgccgccgtgtatcgccccgccctgggcggcaaggctggcccggtcggcaccagttgcgtgagcggaaagatggccgcttcccggccctgctccagggggctcaaaatggaggacgcggcgctcgggagagcgggcgggtgagtcacccacacaaaggaaaagggcctttccgtcctcagccgtcgcttcatgtgactccacggagtaccgggcgccgtccaggcacctcgattagttctggagcttttggagtacgtcgtctttaggttggggggaggggttttatgcgatggagtttccccacactgagtgggtggagactgaagttaggccagcttggcacttgatgtaattctccttggaatttggcctttttgagtttggatcttggttcattctcaagcctcagacagtggttcaaagtttttttcttccatttcaggtgtcgtga

SEQ ID NO: 136 - DNA, 510 bp, artificial sequence
  hPGK
ggggttggggttgcgccttttccaaggcagccctgggtttgcgcagggacgcggctgctctgggcgtggttccgggaaacgcagcggcgccgaccctgggtctcgcacattcttcacgtccgttcgcagcgtcacccggatcttcgccgctacccttgtgggccccccggcgacgcttcctgctccgcccctaagtcgggaaggttccttgcggttcgcggcgtgccggacgtgacaaacggaagccgcacgtctcactagtaccctcgcagacggacagcgccagggagcaatggcagcgcgccgaccgcgatgggctgtggccaatagcggctgctcagcggggcgcgccgagagcagcggccgggaaggggcggtgcgggaggcggggtgtggggcggtagtgtgggccctgttcctgcccgcgcggtgttccgcattctgcaagcctccggagcgcacgtcggcagtcggctccctcgttgaccgaatcaccgacctctctcccca

SEQ ID NO: 137 - DNA, 39 bp, artificial sequence
  mCMV
ggtaggcgtgtacggtgggaggcctatataagcagagct

SEQ ID NO: 138 - DNA, 1212 bp, artificial sequence
  Ubc
gtctaacaaaaaagccaaaaacggccagaatttagcggacaatttactagtctaacactgaaaattacatattgacccaaatgattacatttcaaaaggtgcctaaaaaacttcacaaaacacactcgccaaccccgagcgcatagttcaaaaccggagcttcagctacttaagaagataggtacataaaaccgaccaaagaaactgacgcctcacttatccctcccctcaccagaggtccggcgcctgtcgattcaggagagcctaccctaggcccgaaccctgcgtcctgcgacggagaaaagcctaccgcacacctaccggcaggtggccccaccctgcattataagccaacagaacgggtgacgtcacgacacgacgagggcgcgcgctcccaaaggtacgggtgcactgcccaacggcaccgccataactgccgcccccgcaacagacgacaaaccgagttctccagtcagtgacaaacttcacgtcagggtccccagatggtgccccagcccatctcacccgaataagagctttcccgcattagcgaaggcctcaagaccttgggttcttgccgcccaccatgccccccaccttgtttcaacgacctcacagcccgcctcacaagcgtcttccattcaagactcgggaacagccgccattttgctgcgctccccccaacccccagttcagggcaaccttgctcgcggacccagactacagcccttggcggtctctccacacgcttccgtcccaccgagcggcccggcggccacgaaagccccggccagcccagcagcccgctactcaccaagtgacgatcacagcgatccacaaacaagaaccgcgacccaaatcccggctgcgacggaactagctgtgccacacccggcgcgtccttatataatcatcggcgttcaccgccccacggagatccctccgcagaatcgccgagaagggactacttttcctcgcctgttccgctctctggaaagaaaaccagtgccctagagtcacccaagtcccgtcctaaaatgtccttctgctgatactggggttctaaggccgagtcttatgagcagcgggccgctgtcctgagcgtccgggcggaaggatcaggacgctcgctgcgcccttcgtctgacgtggcagcgctcgccgtgaggaggggggcgcccgcgggaggcgccaaaacccggcgcggaggcc

SEQ ID NO: 139 - DNA, 408 bp, artificial sequence
  SFFV
gtaacgccattttgcaaggcatggaaaaataccaaaccaagaatagagaagttcagatcaagggcgggtacatgaaaatagctaacgttgggccaaacaggatatctgcggtgagcagtttcggccccggcccggggccaagaacagatggtcaccgcagtttcggccccggcccgaggccaagaacagatggtccccagatatggcccaaccctcagcagtttcttaagacccatcagatgtttccaggctcccccaaggacctgaaatgaccctgcgccttatttgaattaaccaatcagcctgcttctcgcttctgttcgcgcgcttctgcttcccgagctctataaaagagctcacaacccctcactcggcgcgccagtcctccgacagactgagtcgcccggg

SEQ ID NO: 140 - RNA, 21 nt, artificial sequence
  hsa-miR-126-5p
cauuauuacuuuugguacgcg

SEQ ID NO: 141 - RNA, 22 nt, artificial sequence
  hsa-miR-126-3p
ucguaccgugaguaauaaugcg

SEQ ID NO: 142 - RNA, 22 nt, artificial sequence
  hsa-miR-223-5p
cguguauuugacaagcugaguu

SEQ ID NO: 143 - RNA, 22 nt, artificial sequence
  hsa-miR-223-3p
ugucaguuugucaaauacccca

SEQ ID NO: 144 - RNA, 23 nt, artificial sequence
  hsa-miR-181a-5p
aacauucaacgcugucggugagu

SEQ ID NO: 145 - RNA, 22 nt, artificial sequence
  hsa-miR-181a-3p
accaucgaccguugauuguacc

SEQ ID NO: 146 - RNA, 22 nt, artificial sequence
  hsa-miR-181a-2-3p
accacugaccguugacuguacc

SEQ ID NO: 147 - RNA, 24 nt, artificial sequence
  hsa-miR-155-5p
uuaaugcuaaucgugauagggguu

SEQ ID NO: 148 - RNA, 22 nt, artificial sequence
  hsa-miR-155-3p
cuccuacauauuagcauuaaca

SEQ ID NO: 149 - RNA, 22 nt, artificial sequence
  hsa-miR-150-5p
ucucccaacccuuguaccagug

SEQ ID NO: 150 - RNA, 22 nt, artificial sequence
  hsa-miR-150-3p
cugguacaggccugggggacag

SEQ ID NO: 151 - protein, 363 aa, homo sapiens
  MISC_FEATURE: ADA
MAQTPAFDKPKVELHVHLDGSIKPETILYYGRRRGIALPANTAEGLLNVIGMDKPLTLPDFLAKFDYYMPAIAGCREAIKRIAYEFVEMKAKEGVVYVEVRYSPHLLANSKVEPIPWNQAEGDLTPDEVVALVGQGLQEGERDFGVKARSILCCMRHQPNWSPKVVELCKKYQQQTVVAIDLAGDETIPGSSLLPGHVQAYQEAVKSGIHRTVHAGEVGSAEVVKEAVDILKTERLGHGYHTLEDQALYNRLRQENMHFEICPWSSYLTGAWKPDTEHAVIRLKNDQANYSLNTDDPLIFKSTLDTDYQMTKRDMGFTEEEFKRLNINAAKSSFLPEDEKRELLDLLYKAYGMPPSASAGQNL

SEQ ID NO: 152 - protein, 369 aa, homo sapiens
  MISC_FEATURE: IL2RG
MLKPSLPFTSLLFLQLPLLGVGLNTTILTPNGNEDTTADFFLTTMPTDSLSVSTLPLPEVQCFVFNVEYMNCTWNSSSEPQPTNLTLHYWYKNSDNDKVQKCSHYLFSEEITSGCQLQKKEIHLYQTFVVQLQDPREPRRQATQMLKLQNLVIPWAPENLTLHKLSESQLELNWNNRFLNHCLEHLVQYRTDWDHSWTEQSVDYRHKFSLPSVDGQKRYTFRVRSRFNPLCGSAQHWSEWSHPIHWGSNTSKENPFLFALEAVVISVGSMGLIISLLCVYFWLERTMPRIPTLKNLEDLVTEYHGNFSAWSGVSKGLAESLQPDYSERLCLVSEIPPKGGALGEGPGASPCNQHSPYWAPPCYTLKPET

SEQ ID NO: 153 - protein, 1094 aa, homo sapiens
  MISC_FEATURE: JAK3
MAPPSEETPLIPQRSCSLLSTEAGALHVLLPARGPGPPQRLSFSFGDHLAEDLCVQAAKASGILPVYHSLFALATEDLSCWFPPSHIFSVEDASTQVLLYRIRFYFPNWFGLEKCHRFGLRKDLASAILDLPVLEHLFAQHRSDLVSGRLPVGLSLKEQGECLSLAVLDLARMAREQAQRPGELLKTVSYKACLPPSLRDLIQGLSFVTRRRIRRTVRRALRRVAACQADRHSLMAKYIMDLERLDPAGAAETFHVGLPGALGGHDGLGLLRVAGDGGIAWTQGEQEVLQPFCDFPEIVDISIKQAPRVGPAGEHRLVTVTRTDNQILEAEFPGLPEALSFVALVDGYFRLTTDSQHFFCKEVAPPRLLEEVAEQCHGPITLDFAINKLKTGGSRPGSYVLRRSPQDFDSFLLTVCVQNPLGPDYKGCLIRRSPTGTFLLVGLSRPHSSLRELLATCWDGGLHVDGVAVTLTSCCIPRPKEKSNLIVVQRGHSPPTSSLVQPQSQYQLSQMTFHKIPADSLEWHENLGHGSFTKIYRGCRHEVVDGEARKTEVLLKVMDAKHKNCMESFLEAASLMSQVSYRHLVLLHGVCMAGDSTMVQEFVHLGAIDMYLRKRGHLVPASWKLQVVKQLAYALNYLEDKGLPHGNVSARKVLLAREGADGSPPFIKLSDPGVSPAVLSLEMLTDRIPWVAPECLREAQTLSLEADKWGFGATVWEVFSGVTMPISALDPAKKLQFYEDRQQLPAPKWTELALLIQQCMAYEPVQRPSFRAVIRDLNSLISSDYELLSDPTPGALAPRDGLWNGAQLYACQDPTIFEERHLKYISQLGKGNFGSVELCRYDPLGDNTGALVAVKQLQHSGPDQQRDFQREIQILKALHSDFIVKYRGVSYGPGRQSLRLVMEYLPSGCLRDFLQRHRARLDASRLLLYSSQICKGMEYLGSRRCVHRDLAARNILVESEAHVKIADFGLAKLLPLDKDYYVVREPGQSPIFWYAPESLSDNIFSRQSDVWSFGVVLYELFTYCDKSCSPSAEFLRMMGCERDVPALCRLLELLEEGQRLPAPPACPAEVSAAGLASVSQSVDWAGVSGKPAGA

SEQ ID NO: 154 - protein, 459 aa, homo sapiens
  MISC_FEATURE: IL7R
MTILGTTFGMVFSLLQVVSGESGYAQNGDLEDAELDDYSFSCYSQLEVNGSQHSLTCAFEDPDVNITNLEFEICGALVEVKCLNFRKLQEIYFIETKKFLLIGKSNICVKVGEKSLTCKKIDLTTIVKPEAPFDLSVVYREGANDFVVTFNTSHLQKKYVKVLMHDVAYRQEKDENKWTHVNLSSTKLTLLQRKLQPAAMYEIKVRSIPDHYFKGFWSEWSPSYYFRTPEINNSSGEMDPILLTISILSFFSVALLVILACVLWKKRIKPIVWPSLPDHKKTLEHLCKKPRKNLNVSFNPESFLDCQIHRVDDIQARDEVEGFLQDTFPQQLEESEKQRLGGDVQSPNCPSEDVVITPESFGRDSSLTCLAGNVSACDAPILSSSRSLDCRESGKNGPHVYQDLLLSLGTTNSTLPPPFSLQSGILTLNPVAQGQPILTSLGSNQEEAYVTMSSFYQNQ

SEQ ID NO: 155 - protein, 147 aa, homo sapiens
  MISC_FEATURE: HBB
MVHLTPEEKSAVTALWGKVNVDEVGGEALGRLLVVYPWTQRFFESFGDLSTPDAVMGNPKVKAHGKKVLGAFSDGLAHLDNLKGTFATLSELHCDKLHVDPENFRLLGNVLVCVLAHHFGKEFTPPVQAAYQKVVAGVANALAHKYH

SEQ ID NO: 156 - protein, 2351 aa, homo sapiens
  MISC_FEATURE: F8
MQIELSTCFFLCLLRFCFSATRRYYLGAVELSWDYMQSDLGELPVDARFPPRVPKSFPFNTSVVYKKTLFVEFTDHLFNIAKPRPPWMGLLGPTIQAEVYDTVVITLKNMASHPVSLHAVGVSYWKASEGAEYDDQTSQREKEDDKVFPGGSHTYVWQVLKENGPMASDPLCLTYSYLSHVDLVKDLNSGLIGALLVCREGSLAKEKTQTLHKFILLFAVFDEGKSWHSETKNSLMQDRDAASARAWPKMHTVNGYVNRSLPGLIGCHRKSVYWHVIGMGTTPEVHSIFLEGHTFLVRNHRQASLEISPITFLTAQTLLMDLGQFLLFCHISSHQHDGMEAYVKVDSCPEEPQLRMKNNEEAEDYDDDLTDSEMDVVRFDDDNSPSFIQIRSVAKKHPKTWVHYIAAEEEDWDYAPLVLAPDDRSYKSQYLNNGPQRIGRKYKKVRFMAYTDETFKTREAIQHESGILGPLLYGEVGDTLLIIFKNQASRPYNIYPHGITDVRPLYSRRLPKGVKHLKDFPILPGEIFKYKWTVTVEDGPTKSDPRCLTRYYSSFVNMERDLASGLIGPLLICYKESVDQRGNQIMSDKRNVILFSVFDENRSWYLTENIQRFLPNPAGVQLEDPEFQASNIMHSINGYVFDSLQLSVCLHEVAYWYILSIGAQTDFLSVFFSGYTFKHKMVYEDTLTLFPFSGETVFMSMENPGLWILGCHNSDFRNRGMTALLKVSSCDKNTGDYYEDSYEDISAYLLSKNNAIEPRSFSQNSRHPSTRQKQFNATTIPENDIEKTDPWFAHRTPMPKIQNVSSSDLLMLLRQSPTPHGLSLSDLQEAKYETFSDDPSPGAIDSNNSLSEMTHFRPQLHHSGDMVFTPESGLQLRLNEKLGTTAATELKKLDFKVSSTSNNLISTIPSDNLAAGTDNTSSLGPPSMPVHYDSQLDTTLFGKKSSPLTESGGPLSLSEENNDSKLLESGLMNSQESSWGKNVSSTESGRLFKGKRAHGPALLTKDNALFKVSISLLKTNKTSNNSATNRKTHIDGPSLLIENSPSVWQNILESDTEFKKVTPLIHDRMLMDKNATALRLNHMSNKTTSSKNMEMVQQKKEGPIPPDAQNPDMSFFKMLFLPESARWIQRTHGKNSLNSGQGPSPKQLVSLGPEKSVEGQNFLSEKNKVVVGKGEFTKDVGLKEMVFPSSRNLFLTNLDNLHENNTHNQEKKIQEEIEKKETLIQENVVLPQIHTVTGTKNFMKNLFLLSTRQNVEGSYDGAYAPVLQDFRSLNDSTNRTKKHTAHFSKKGEEENLEGLGNQTKQIVEKYACTTRISPNTSQQNFVTQRSKRALKQFRLPLEETELEKRIIVDDTSTQWSKNMKHLTPSTLTQIDYNEKEKGAITQSPLSDCLTRSHSIPQANRSPLPIAKVSSFPSIRPIYLTRVLFQDNSSHLPAASYRKKDSGVQESSHFLQGAKKNNLSLAILTLEMTGDQREVGSLGTSATNSVTYKKVENTVLPKPDLPKTSGKVELLPKVHIYQKDLFPTETSNGSPGHLDLVEGSLLQGTEGAIKWNEANRPGKVPFLRVATESSAKTPSKLLDPLAWDNHYGTQIPKEEWKSQEKSPEKTAFKKKDTILSLNACESNHAIAAINEGQNKPEIEVTWAKQGRTERLCSQNPPVLKRHQREITRTTLQSDQEEIDYDDTISVEMKKEDFDIYDEDENQSPRSFQKKTRHYFIAAVERLWDYGMSSSPHVLRNRAQSGSVPQFKKVVFQEFTDGSFTQPLYRGELNEHLGLLGPYIRAEVEDNIMVTFRNQASRPYSFYSSLISYEEDQRQGAEPRKNFVKPNETKTYFWKVQHHMAPTKDEFDCKAWAYFSDVDLEKDVHSGLIGPLLVCHTNTLNPAHGRQVTVQEFALFFTIFDETKSWYFTENMERNCRAPCNIQMEDPTFKENYRFHAINGYIMDTLPGLVMAQDQRIRWYLLSMGSNENIHSIHFSGHVFTVRKKEEYKMALYNLYPGVFETVEMLPSKAGIWRVECLIGEHLHAGMSTLFLVYSNKCQTPLGMASGHIRDFQITASGQYGQWAPKLARLHYSGSINAWSTKEPFSWIKVDLLAPMIIHGIKTQGARQKFSSLYISQFIIMYSLDGKKWQTYRGNSTGTLMVFFGNVDSSGIKHNIFNPPIIARYIRLHPTHYSIRSTLRMELMGCDLNSCSMPLGMESKAISDAQITASSYFTNMFATWSPSKARLHLQGRSNAWRPQVNNPKEWLQVDFQKTMKVTGVTTQGVKSLLTSMYVKEFLISSSQDGHQWTLFFQNGKVKVFQGNQDSFTPVVNSLDPPLLTRYLRIHPQSWVHQIALRMEVLGCEAQDLY

SEQ ID NO: 157 - protein, 461 aa, homo sapiens
  MISC_FEATURE: F9
MQRVNMIMAESPGLITICLLGYLLSAECTVFLDHENANKILNRPKRYNSGKLEEFVQGNLERECMEEKCSFEEAREVFENTERTTEFWKQYVDGDQCESNPCLNGGSCKDDINSYECWCPFGFEGKNCELDVTCNIKNGRCEQFCKNSADNKVVCSCTEGYRLAENQKSCEPAVPFPCGRVSVSQTSKLTRAETVFPDVDYVNSTEAETILDNITQSTQSFNDFTRVVGGEDAKPGQFPWQVVLNGKVDAFCGGSIVNEKWIVTAAHCVETGVKITVVAGEHNIEETEHTEQKRNVIRIIPHHNYNAAINKYNHDIALLELDEPLVLNSYVTPICIADKEYTNIFLKFGSGYVSGWGRVFHKGRSALVLQYLRVPLVDRATCLRSTKFTIYNNMFCAGFHEGGRDSCQGDSGGPHVTEVEGTSFLTGIISWGEECAMKGKYGIYTKVSRYVNWIKEKTKLT

SEQ ID NO: 158 - protein, 502 aa, homo sapiens
  MISC_FEATURE: WAS
MSGGPMGGRPGGRGAPAVQQNIPSTLLQDHENQRLFEMLGRKCLTLATAVVQLYLALPPGAEHWTKEHCGAVCFVKDNPQKSYFIRLYGLQAGRLLWEQELYSQLVYSTPTPFFHTFAGDDCQAGLNFADEDEAQAFRALVQEKIQKRNQRQSGDRRQLPPPPTPANEERRGGLPPLPLHPGGDQGGPPVGPLSLGLATVDIQNPDITSSRYRGLPAPGPSPADKKRSGKKKISKADIGAPSGFKHVSHVGWDPQNGFDVNNLDPDLRSLFSRAGISEAQLTDAETSKLIYDFIEDQGGLEAVRQEMRRQEPLPPPPPPSRGGNQLPRPPIVGGNKGRSGPLPPVPLGIAPPPPTPRGPPPPGRGGPPPPPPPATGRSGPLPPPPPGAGGPPMPPPPPPPPPPPSSGNGPAPPPLPPALVPAGGLAPGGGRGALLDQIRQGIQLNKTPGAPESSALQPPPQSSEGLVGALMHVMQKRSRAIHSSDEGEDQAGDEDEDDEWDD

SEQ ID NO: 159 - protein, 195 aa, homo sapiens
  MISC_FEATURE: CYBA
MGQIEWAMWANEQALASGLILITGGIVATAGRFTQWYFGAYSIVAGVFVCLLEYPRGKRKKGSTMERWGQKYMTAVVKLFGPFTRNYYVRAVLHLLLSVPAGFLLATILGTACLAIASGIYLLAAVRGEQWTPIEPKPRERPQIGGTIKQPPSNPPPRPPAEARKKPSEEEAAVAAGGPPGGPQVNPIPVTDEVV

SEQ ID NO: 160 - protein, 570 aa, homo sapiens
  MISC_FEATURE: CYBB
MGNWAVNEGLSIFVILVWLGLNVFLFVWYYRVYDIPPKFFYTRKLLGSALALARAPAACLNFNCMLILLPVCRNLLSFLRGSSACCSTRVRRQLDRNLTFHKMVAWMIALHSAIHTIAHLFNVEWCVNARVNNSDPYSVALSELGDRQNESYLNFARKRIKNPEGGLYLAVTLLAGITGVVITLCLILIITSSTKTIRRSYFEVFWYTHHLFVIFFIGLAIHGAERIVRGQTAESLAVHNITVCEQKISEWGKIKECPIPQFAGNPPMTWKWIVGPMFLYLCERLVRFWRSQQKVVITKVVTHPFKTIELQMKKKGFKMEVGQYIFVKCPKVSKLEWHPFTLTSAPEEDFFSIHIRIVGDWTEGLFNACGCDKQEFQDAWKLPKIAVDGPFGTASEDVFSYEVVMLVGAGIGVTPFASILKSVWYKYCNNATNLKLKKIYFYWLCRDTHAFEWFADLLQLLESQMQERNNAGFLSYNIYLTGWDESQANHFAVHHDEEKDVITGLKQKTLYGRPNWDNEFKTIASQHPNTRIGVFLCGPEALAETLSKQSISNSESGPRGVHFIFNKENF

SEQ ID NO: 161 - protein, 390 aa, homo sapiens
  MISC_FEATURE: NCF1
MGDTFIRHIALLGFEKRFVPSQHYVYMFLVKWQDLSEKVVYRRFTEIYEFHKTLKEMFPIEAGAINPENRIIPHLPAPKWFDGQRAAENRQGTLTEYCSTLMSLPTKISRCPHLLDFFKVRPDDLKLPTDNQTKKPETYLMPKDGKSTATDITGPIILQTYRAIANYEKTSGSEMALSTGDVVEVVEKSESGWWFCQMKAKRGWIPASFLEPLDSPDETEDPEPNYAGEPYVAIKAYTAVEGDEVSLLEGEAVEVIHKLLDGWWVIRKDDVTGYFPSMYLQKSGQDVSQAQRQIKRGAPPRRSSIRNAHSIHQRSRKRLSQDAYRRNSVRFLQQRRRQARPGPQSPGSPLEEERQTQRSKPQPAVPPRPSADLILNRCSESTKRKLASAV

SEQ ID NO: 162 - protein, 526 aa, homo sapiens
  MISC_FEATURE: NCF2
MSLVEAISLWNEGVLAADKKDWKGALDAFSAVQDPHSRICFNIGCMYTILKNMTEAEKAFTRSINRDKHLAVAYFQRGMLYYQTEKYDLAIKDLKEALIQLRGNQLIDYKILGLQFKLFACEVLYNIAFMYAKKEEWKKAEEQLALATSMKSEPRHSKIDKAMECVWKQKLYEPVVIPVGKLFRPNERQVAQLAKKDYLGKATVVASVVDQDSFSGFAPLQPQAAEPPPRPKTPEIFRALEGEAHRVLFGFVPETKEELQVMPGNIVFVLKKGNDNWATVMFNGQKGLVPCNYLEPVELRIHPQQQPQEESSPQSDIPAPPSSKAPGRPQLSPGQKQKEEPKEVKLSVPMPYTLKVHYKYTVVMKTQPGLPYSQVRDMVSKKLELRLEHTKLSYRPRDSNELVPLSEDSMKDAWGQVKNYCLTLWCENTVGDQGFPDEPKESEKADANNQTTEPQLKKGSQVEALFSYEATQPEDLEFQEGDIILVLSKVNEEWLEGECKGKVGIFPKVFVEDCATTDLESTRREV

SEQ ID NO: 163 - protein, 339 aa, homo sapiens
  MISC_FEATURE: NCF4
MAVAQQLRAESDFEQLPDDVAISANIADIEEKRGFTSHFVFVIEVKTKGGSKYLIYRRYRQFHALQSKLEERFGPDSKSSALACTLPTLPAKVYVGVKQEIAEMRIPALNAYMKSLLSLPVWVLMDEDVRIFFYQSPYDSEQVPQALRRLRPRTRKVKSVSPQGNSVDRMAAPRAEALFDFTGNSKLELNFKAGDVIFLLSRINKDWLEGTVRGATGIFPLSFVKILKDFPEEDDPTNWLRCYYYEDTISTIKDIAVEEDLSSTPLLKDLLELTRREFQREDIALNYRDAEGDLVRLLSDEDVALMVRQARGLPSQKRLFPWKLHITQKDNYRVYNTMP

SEQ ID NO: 164 - protein, 265 aa, homo sapiens
  MISC_FEATURE: UROS
MKVLLLKDAKEDDCGQDPYIRELGLYGLEATLIPVLSFEFLSLPSFSEKLSHPEDYGGLIFTSPRAVEAAELCLEQNNKTEVWERSLKEKWNAKSVYVVGNATASLVSKIGLDTEGETCGNAEKLAEYICSRESSALPLLFPCGNLKREILPKALKDKGIAMESITVYQTVAHPGIQGNLNSYYSQQGVPASITFFSPSGLTYSLKHIQELSGDNIDQIKFAAIGPTTARALAAQGLPVSCTAESPTPQALATGIRKALQPHGCC

SEQ ID NO: 165 - protein, 830 aa, homo sapiens
  MISC_FEATURE: TCIRG1
MGSMFRSEEVALVQLFLPTAAAYTCVSRLGELGLVEFRDLNASVSAFQRRFVVDVRRCEELEKTFTFLQEEVRRAGLVLPPPKGRLPAPPPRDLLRIQEETERLAQELRDVRGNQQALRAQLHQLQLHAAVLRQGHEPQLAAAHTDGASERTPLLQAPGGPHQDLRVNFVAGAVEPHKAPALERLLWRACRGFLIASFRELEQPLEHPVTGEPATWMTFLISYWGEQIGQKIRKITDCFHCHVFPFLQQEEARLGALQQLQQQSQELQEVLGETERFLSQVLGRVLQLLPPGQVQVHKMKAVYLALNQCSVSTTHKCLIAEAWCSVRDLPALQEALRDSSMEEGVSAVAHRIPCRDMPPTLIRTNRFTASFQGIVDAYGVGRYQEVNPAPYTIITFPFLFAVMFGDVGHGLLMFLFALAMVLAENRPAVKAAQNEIWQTFFRGRYLLLLMGLFSIYTGFIYNECFSRATSIFPSGWSVAAMANQSGWSDAFLAQHTMLTLDPNVTGVFLGPYPFGIDPIWSLAANHLSFLNSFKMKMSVILGVVHMAFGVVLGVFNHVHFGQRHRLLLETLPELTFLLGLFGYLVFLVIYKWLCVWAARAASAPSILIHFINMFLFSHSPSNRLLYPRQEVVQATLVVLALAMVPILLLGTPLHLLHRHRRRLRRRPADRQEENKAGLLDLPDASVNGWSSDEEKAGGLDDEEEAELVPSEVLMHQAIHTIEFCLGCVSNTASYLRLWALSLAHAQLSEVLWAMVMRIGLGLGREVGVAAVVLVPIFAAFAVMTVAILLVMEGLSAFLHALRLHWVEFQNKFYSGTGYKLSPFTFAATDD

SEQ ID NO: 166 - protein, 805 aa, homo sapiens
  MISC_FEATURE: CLCN7
MANVSKKVSWSGRDRDDEEAAPLLRRTARPGGGTPLLNGAGPGAARQSPRSALFRVGHMSSVELDDELLDPDMDPPHPFPKEIPHNEKLLSLKYESLDYDNSENQLFLEEERRINHTAFRTVEIKRWVICALIGILTGLVACFIDIVVENLAGLKYRVIKGNIDKFTEKGGLSFSLLLWATLNAAFVLVGSVIVAFIEPVAAGSGIPQIKCFLNGVKIPHVVRLKTLVIKVSGVILSVVGGLAVGKEGPMIHSGSVIAAGISQGRSTSLKRDFKIFEYFRRDTEKRDFVSAGAAAGVSAAFGAPVGGVLFSLEEGASFWNQFLTWRIFFASMISTFTLNFVLSIYHGNMWDLSSPGLINFGRFDSEKMAYTIHEIPVFIAMGVVGGVLGAVFNALNYWLTMFRIRYIHRPCLQVIEAVLVAAVTATVAFVLIYSSRDCQPLQGGSMSYPLQLFCADGEYNSMAAAFFNTPEKSVVSLFHDPPGSYNPLTLGLFTLVYFFLACWTYGLTVSAGVFIPSLLIGAAWGRLFGISLSYLTGAAIWADPGKYALMGAAAQLGGIVRMTLSLTVIMMEATSNVTYGFPIMLVLMTAKIVGDVFIEGLYDMHIQLQSVPFLHWEAPVTSHSLTAREVMSTPVTCLRRREKVGVIVDVLSDTASNHNGFPVVEHADDTQPARLQGLILRSQLIVLLKHKVFVERSNLGLVQRRLRLKDFRDAYPRFPPIQSIHVSQDERECTMDLSEFMNPSPYTVPQEASLPRVFKLFRALGLRHLVVVDNRNQVVGLVTRKDLARYRLGKRGLEELSLAQT

SEQ ID NO: 167 - protein, 635 aa, homo sapiens
  MISC_FEATURE: MPL
MPSWALFMVTSCLLLAPQNLAQVSSQDVSLLASDSEPLKCFSRTFEDLTCFWDEEEAAPSGTYQLLYAYPREKPRACPLSSQSMPHFGTRYVCQFPDQEEVRLFFPLHLWVKNVFLNQTRTQRVLFVDSVGLPAPPSIIKAMGGSQPGELQISWEEPAPEISDFLRYELRYGPRDPKNSTGPTVIQLIATETCCPALQRPHSASALDQSPCAQPTMPWQDGPKQTSPSREASALTAEGGSCLISGLQPGNSYWLQLRSEPDGISLGGSWGSWSLPVTVDLPGDAVALGLQCFTLDLKNVTCQWQQQDHASSQGFFYHSRARCCPRDRYPIWENCEEEEKTNPGLQTPQFSRCHFKSRNDSIIHILVEVTTAPGTVHSYLGSPFWIHQAVRLPTPNLHWREISSGHLELEWQHPSSWAAQETCYQLRYTGEGHQDWKVLEPPLGARGGTLELRPRSRYRLQLRARLNGPTYQGPWSSWSDPTRVETATETAWISLVTALHLVLGLSAVLGLLLLRWQFPAHYRRLRHALWPSLPDLHRVLGQYLRDTAALSPPKATVSDTCEEVEPSLLEILPKSSERTPLPLCSSQAQMDYRRLQPSCLGTMPLSVCPPMAESGSCCTTHIANHSYLPLSYWQQP

SEQ ID NO: 168 - protein, 1039 aa, homo sapiens
  MISC_FEATURE: ITGA2B
MARALCPLQALWLLEWVLLLLGPCAAPPAWALNLDPVQLTFYAGPNGSQFGFSLDFHKDSHGRVAIVVGAPRTLGPSQEETGGVFLCPWRAEGGQCPSLLFDLRDETRNVGSQTLQTFKARQGLGASVVSWSDVIVACAPWQHWNVLEKTEEAEKTPVGSCFLAQPESGRRAEYSPCRGNTLSRIYVENDFSWDKRYCEAGFSSVVTQAGELVLGAPGGYYFLGLLAQAPVADIFSSYRPGILLWHVSSQSLSFDSSNPEYFDGYWGYSVAVGEFDGDLNTTEYVVGAPTWSWTLGAVEILDSYYQRLHRLRGEQMASYFGHSVAVTDVNGDGRHDLLVGAPLYMESRADRKLAEVGRVYLFLQPRGPHALGAPSLLLTGTQLYGRFGSAIAPLGDLDRDGYNDIAVAAPYGGPSGRGQVLVFLGQSEGLRSRPSQVLDSPFPTGSAFGFSLRGAVDIDDNGYPDLIVGAYGANQVAVYRAQPVVKASVQLLVQDSLNPAVKSCVLPQTKTPVSCFNIQMCVGATGHNIPQKLSLNAELQLDRQKPRQGRRVLLLGSQQAGTTLNLDLGGKHSPICHTTMAFLRDEADFRDKLSPIVLSLNVSLPPTEAGMAPAVVLHGDTHVQEQTRIVLDCGEDDVCVPQLQLTASVTGSPLLVGADNVLELQMDAANEGEGAYEAELAVHLPQGAHYMRALSNVEGFERLICNQKKENETRVVLCELGNPMKKNAQIGIAMLVSVGNLEEAGESVSFQLQIRSKNSQNPNSKIVLLDVPVRAEAQVELRGNSFPASLVVAAEEGEREQNSLDSWGPKVEHTYELHNNGPGTVNGLHLSIHLPGQSQPSDLLYILDIQPQGGLQCFPQPPVNPLKVDWGLPIPSPSPIHPAHHKRDRRQIFLPEPEQPSRLQDPVLVSCDSAPCTVVQCDLQEMARGQRAMVTVLAFLWLPSLYQRPLDQFVLQSHAWFNVSSLPYAVPPLSLPRGEAQVWTQLLRALEERAIPIWWVLVGVLGGLLLLTILVLAMWKVGFFKRNRPPLEEDDEEGE

SEQ ID NO: 169 - protein, 788 aa, homo sapiens
  MISC_FEATURE: ITGB3
MRARPRPRPLWATVLALGALAGVGVGGPNICTTRGVSSCQQCLAVSPMCAWCSDEALPLGSPRCDLKENLLKDNCAPESIEFPVSEARVLEDRPLSDKGSGDSSQVTQVSPQRIALRLRPDDSKNFSIQVRQVEDYPVDIYYLMDLSYSMKDDLWSIQNLGTKLATQMRKLTSNLRIGFGAFVDKPVSPYMYISPPEALENPCYDMKTTCLPMFGYKHVLTLTDQVTRFNEEVKKQSVSRNRDAPEGGFDAIMQATVCDEKIGWRNDASHLLVFTTDAKTHIALDGRLAGIVQPNDGQCHVGSDNHYSASTTMDYPSLGLMTEKLSQKNINLIFAVTENVVNLYQNYSELIPGTTVGVLSMDSSNVLQLIVDAYGKIRSKVELEVRDLPEELSLSFNATCLNNEVIPGLKSCMGLKIGDTVSFSIEAKVRGCPQEKEKSFTIKPVGFKDSLIVQVTFDCDCACQAQAEPNSHRCNNGNGTFECGVCRCGPGWLGSQCECSEEDYRPSQQDECSPREGQPVCSQRGECLCGQCVCHSSDFGKITGKYCECDDFSCVRYKGEMCSGHGQCSCGDCLCDSDWTGYYCNCTTRTDTCMSSNGLLCSGRGKCECGSCVCIQPGSYGDTCEKCPTCPDACTFKKECVECKKFDRGALHDENTCNRYCRDEIESVKELKDTGKDAVNCTYKNEDDCVVRFQYYEDSSGKSILYVVEEPECPKGPDILVVLLSVMGAILLIGLAALLIWKLLITIHDRKEFAKFEEERARAKWDTANNPLYKEATSTFTNITYRGT

SEQ ID NO: 170 - protein, 769 aa, homo sapiens
  MISC_FEATURE: ITGB2
MLGLRPPLLALVGLLSLGCVLSQECTKFKVSSCRECIESGPGCTWCQKLNFTGPGDPDSIRCDTRPQLLMRGCAADDIMDPTSLAETQEDHNGGQKQLSPQKVTLYLRPGQAAAFNVTFRRAKGYPIDLYYLMDLSYSMLDDLRNVKKLGGDLLRALNEITESGRIGFGSFVDKTVLPFVNTHPDKLRNPCPNKEKECQPPFAFRHVLKLTNNSNQFQTEVGKQLISGNLDAPEGGLDAMMQVAACPEEIGWRNVTRLLVFATDDGFHFAGDGKLGAILTPNDGRCHLEDNLYKRSNEFDYPSVGQLAHKLAENNIQPIFAVTSRMVKTYEKLTEIIPKSAVGELSEDSSNVVQLIKNAYNKLSSRVFLDHNALPDTLKVTYDSFCSNGVTHRNQPRGDCDGVQINVPITFQVKVTATECIQEQSFVIRALGFTDIVTVQVLPQCECRCRDQSRDRSLCHGKGFLECGICRCDTGYIGKNCECQTQGRSSQELEGSCRKDNNSIICSGLGDCVCGQCLCHTSDVPGKLIYGQYCECDTINCERYNGQVCGGPGRGLCFCGKCRCHPGFEGSACQCERTTEGCLNPRRVECSGRGRCRCNVCECHSGYQLPLCQECPGCPSPCGKYISCAECLKFEKGPFGKNCSAACPGLQLSNNPVKGRTCKERDSEGCWVAYTLEQQDGMDRYLIYVDESRECVAGPNIAAIVGGTVAGIVLIGILLLVIWKALIHLSDLREYRRFEKEKLKSQWNNDNPLFKSATTTVMNPKFAES

SEQ ID NO: 171 - protein, 574 aa, homo sapiens
  MISC_FEATURE: PKLR
MSIQENISSLQLRSWVSKSQRDLAKSILIGAPGGPAGYLRRASVAQLTQELGTAFFQQQQLPAAMADTFLEHLCLLDIDSEPVAARSTSIIATIGPASRSVERLKEMIKAGMNIARLNFSHGSHEYHAESIANVREAVESFAGSPLSYRPVAIALDTKGPEIRTGILQGGPESEVELVKGSQVLVTVDPAFRTRGNANTVWVDYPNIVRVVPVGGRIYIDDGLISLVVQKIGPEGLVTQVENGGVLGSRKGVNLPGAQVDLPGLSEQDVRDLRFGVEHGVDIVFASFVRKASDVAAVRAALGPEGHGIKIISKIENHEGVKRFDEILEVSDGIMVARGDLGIEIPAEKVFLAQKMMIGRCNLAGKPVVCATQMLESMITKPRPTRAETSDVANAVLDGADCIMLSGETAKGNFPVEAVKMQHAIAREAEAAVYHRQLFEELRRAAPLSRDPTEVTAIGAVEAAFKCCAAAIIVLTTTGRSAQLLSRYRPRAAVIAVTRSAQAARQVHLCRGVFPLLYREPPEAIWADDVDRRVQFGIESGKLRGFLRVGDLVIVVTGWRPGSGYTNIMRVLSIS

SEQ ID NO: 172 - protein, 304 aa, homo sapiens
  MISC_FEATURE: SLC25A38
MIQNSRPSLLQPQDVGDTVETLMLHPVIKAFLCGSISGTCSTLLFQPLDLLKTRLQTLQPSDHGSRRVGMLAVLLKVVRTESLLGLWKGMSPSIVRCVPGVGIYFGTLYSLKQYFLRGHPPTALESVMLGVGSRSVAGVCMSPITVIKTRYESGKYGYESIYAALRSIYHSEGHRGLFSGLTATLLRDAPFSGIYLMFYNQTKNIVPHDQVDATLIPITNFSCGIFAGILASLVTQPADVIKTHMQLYPLKFQWIGQAVTLIFKDYGLRGFFQGGIPRALRRTLMAAMAWTVYEEMMAKMGLKS

SEQ ID NO: 173 - protein, 1043 aa, homo sapiens
  MISC_FEATURE: RAG1
MAASFPPTLGLSSAPDEIQHPHIKFSEWKFKLFRVRSFEKTPEEAQKEKKDSFEGKPSLEQSPAVLDKADGQKPVPTQPLLKAHPKFSKKFHDNEKARGKAIHQANLRHLCRICGNSFRADEHNRRYPVHGPVDGKTLGLLRKKEKRATSWPDLIAKVFRIDVKADVDSIHPTEFCHNCWSIMHRKFSSAPCEVYFPRNVTMEWHPHTPSCDICNTARRGLKRKSLQPNLQLSKKLKTVLDQARQARQHKRRAQARISSKDVMKKIANCSKIHLSTKLLAVDFPEHFVKSISCQICEHILADPVETNCKHVFCRVCILRCLKVMGSYCPSCRYPCFPTDLESPVKSFLSVLNSLMVKCPAKECNEEVSLEKYNHHISSHKESKEIFVHINKGGRPRQHLLSLTRRAQKHRLRELKLQVKAFADKEEGGDVKSVCMTLFLLALRARNEHRQADELEAIMQGKGSGLQPAVCLAIRVNTFLSCSQYHKMYRTVKAITGRQIFQPLHALRNAEKVLLPGYHHFEWQPPLKNVSSSTDVGIIDGLSGLSSSVDDYPVDTIAKRFRYDSALVSALMDMEEDILEGMRSQDLDDYLNGPFTVVVKESCDGMGDVSEKHGSGPVVPEKAVRFSFTIMKITIAHSSQNVKVFEEAKPNSELCCKPLCLMLADESDHETLTAILSPLIAEREAMKSSELMLELGGILRTFKFIFRGTGYDEKLVREVEGLEASGSVYICTLCDATRLEASQNLVFHSITRSHAENLERYEVWRSNPYHESVEELRDRVKGVSAKPFIETVPSIDALHCDIGNAAEFYKIFQLEIGEVYKNPNASKEERKRWQATLDKHLRKKMNLKPIMRMNGNFARKLMTKETVDAVCELIPSEERHEALRELMDLYLKMKPVWRSSCPAKECPESLCQYSFNSQRFAELLSTKFKYRYEGKITNYFHKTLAHVPEIIERDGSIGAWASEGNESGNKLFRRFRKMNARQSKCYEMEDVLKHHWLYTSKYLQKFMNAHNALKTSGFTMNPQASLGDPLGIEDSLESQDSMEF

SEQ ID NO: 174 - protein, 527 aa, homo sapiens
  MISC_FEATURE: RAG2
MSLQMVTVSNNIALIQPGFSLMNFDGQVFFFGQKGWPKRSCPTGVFHLDVKHNHVKLKPTIFSKDSCYLPPLRYPATCTFKGSLESEKHQYIIHGGKTPNNEVSDKIYVMSIVCKNNKKVTFRCTEKDLVGDVPEARYGHSINVVYSRGKSMGVLFGGRSYMPSTHRTTEKWNSVADCLPCVFLVDFEFGCATSYILPELQDGLSFHVSIAKNDTIYILGGHSLANNIRPANLYRIRVDLPLGSPAVNCTVLPGGISVSSAILTQTNNDEFVIVGGYQLENQKRMICNIISLEDNKIEIREMETPDWTPDIKHSKIWFGSNMGNGTVFLGIPGDNKQVVSEGFYFYMLKCAEDDTNEEQTTFTNSQTSTEDPGDSTPFEDSEEFCFSAEANSFDGDDEFDTYNEDDEEDESETGYWITCCPTCDVDINTWVPFYSTELNKPAMIYCSHGDGHWVHAQCMDLAERTLIHLSAGSNKYYCNEHVEIARALHTPQRVLPLKKPPMKSLRKKGSGKILTPAKKSFLRRLFD

SEQ ID NO: 175 - protein, 1455 aa, homo sapiens
  MISC_FEATURE: FANCA
MSDSWVPNSASGQDPGGRRRAWAELLAGRVKREKYNPERAQKLKESAVRLLRSHQDLNALLLEVEGPLCKKLSLSKVIDCDSSEAYANHSSSFIGSALQDQASRLGVPVGILSAGMVASSVGQICTAPAETSHPVLLTVEQRKKLSSLLEFAQYLLAHSMFSRLSFCQELWKIQSSLLLEAVWHLHVQGIVSLQELLESHPDMHAVGSWLFRNLCCLCEQMEASCQHADVARAMLSDFVQMFVLRGFQKNSDLRRTVEPEKMPQVTVDVLQRMLIFALDALAAGVQEESSTHKIVRCWFGVFSGHTLGSVISTDPLKRFFSHTLTQILTHSPVLKASDAVQMQREWSFARTHPLLTSLYRRLFVMLSAEELVGHLQEVLETQEVHWQRVLSFVSALVVCFPEAQQLLEDWVARLMAQAFESCQLDSMVTAFLVVRQAALEGPSAFLSYADWFKASFGSTRGYHGCSKKALVFLFTFLSELVPFESPRYLQVHILHPPLVPGKYRSLLTDYISLAKTRLADLKVSIENMGLYEDLSSAGDITEPHSQALQDVEKAIMVFEHTGNIPVTVMEASIFRRPYYVSHFLPALLTPRVLPKVPDSRVAFIESLKRADKIPPSLYSTYCQACSAAEEKPEDAALGVRAEPNSAEEPLGQLTAALGELRASMTDPSQRDVISAQVAVISERLRAVLGHNEDDSSVEISKIQLSINTPRLEPREHMAVDLLLTSFCQNLMAASSVAPPERQGPWAALFVRTMCGRVLPAVLTRLCQLLRHQGPSLSAPHVLGLAALAVHLGESRSALPEVDVGPPAPGAGLPVPALFDSLLTCRTRDSLFFCLKFCTAAISYSLCKFSSQSRDTLCSCLSPGLIKKFQFLMFRLFSEARQPLSEEDVASLSWRPLHLPSADWQRAALSLWTHRTFREVLKEEDVHLTYQDWLHLELEIQPEADALSDTERQDFHQWAIHEHFLPESSASGGCDGDLQAACTILVNALMDFHQSSRSYDHSENSDLVFGGRTGNEDIISRLQEMVADLELQQDLIVPLGHTPSQEHFLFEIFRRRLQALTSGWSVAASLQRQRELLMYKRILLRLPSSVLCGSSFQAEQPITARCEQFFHLVNSEMRNFCSHGGALTQDITAHFFRGLLNACLRSRDPSLMVDFILAKCQTKCPLILTSALVWWPSLEPVLLCRWRRHCQSPLPRELQKLQEGRQFASDFLSPEAASPAPNPDWLSAAALHFAIQQVREENIRKQLKKLDCEREELLVFLFFFSLMGLLSSHLTSNSTTDLPKAFHVCAAILECLEKRKISWLALFQLTESDLRLGRLLLRVAPDQHTRLLPFAFYSLLSYFHEDAAIREEAFLHVAVDMYLKLVQLFVAGDTSTVSPPAGRSLELKGQGNPVELITKARLFLLQLIPRCPKKSFSHVAELLADRGDCDPEVSAALQSRQQAAPDADLSQEPHLF

SEQ ID NO: 176 - protein, 558 aa, homo sapiens
  MISC_FEATURE: FANCC
MAQDSVDLSCDYQFWMQKLSVWDQASTLETQQDTCLHVAQFQEFLRKMYEALKEMDSNTVIERFPTIGQLLAKACWNPFILAYDESQKILIWCLCCLINKEPQNSGQSKLNSWIQGVLSHILSALRFDKEVALFTQGLGYAPIDYYPGLLKNMVLSLASELRENHLNGFNTQRRMAPERVASLSRVCVPLITLTDVDPLVEALLICHGREPQEILQPEFFEAVNEAILLKKISLPMSAVVCLWLRHLPSLEKAMLHLFEKLISSERNCLRRIECFIKDSSLPQAACHPAIFRVVDEMFRCALLETDGALEIIATIQVFTQCFVEALEKASKQLRFALKTYFPYTSPSLAMVLLQDPQDIPRGHWLQTLKHISELLREAVEDQTHGSCGGPFESWFLFIHFGGWAEMVAEQLLMSAAEPPTALLWLLAFYYGPRDGRQQRAQTMVQVKAVLGHLLAMSRSSSLSAQDLQTVAGQGTDTDLRAPAQQLIRHLLLNFLLWAPGGHTIAWDVITLMAHTAEITHEIIGFLDQTLYRWNRLGIESPRSEKLARELLKELRTQV

SEQ ID NO: 177 - protein, 622 aa, homo sapiens
  MISC_FEATURE: FANCG
MSRQTTSVGSSCLDLWREKNDRLVRQAKVAQNSGLTLRRQQLAQDALEGLRGLLHSLQGLPAAVPVLPLELTVTCNFIILRASLAQGFTEDQAQDIQRSLERVLETQEQQGPRLEQGLRELWDSVLRASCLLPELLSALHRLVGLQAALWLSADRLGDLALLLETLNGSQSGASKDLLLLLKTWSPPAEELDAPLTLQDAQGLKDVLLTAFAYRQGLQELITGNPDKALSSLHEAASGLCPRPVLVQVYTALGSCHRKMGNPQRALLYLVAALKEGSAWGPPLLEASRLYQQLGDTTAELESLELLVEALNVPCSSKAPQFLIEVELLLPPPDLASPLHCGTQSQTKHILASRCLQTGRAGDAAEHYLDLLALLLDSSEPRFSPPPSPPGPCMPEVFLEAAVALIQAGRAQDALTLCEELLSRTSSLLPKMSRLWEDARKGTKELPYCPLWVSATHLLQGQAWVQLGAQKVAISEFSRCLELLFRATPEEKEQGAAFNCEQGCKSDAALQQLRAAALISRGLEWVASGQDTKALQDFLLSVQMCPGNRDTYFHLLQTLKRLDRRDEATALWWRLEAQTKGSHEDALWSLPLYLESYLSWIRPSDRDAFLEEFRTSLPKSCDL

SEQ ID NO: 178 - protein, 745 aa, homo sapiens [sequence omitted]

SEQ ID NO: 179 - protein, 1011 aa, homo sapiens
  MISC_FEATURE: MAN2B1
MGAYARASGVCARGCLDSAGPWTMSRALRPPLPPLCFFLLLLAAAGARAGGYETCPTVQPNMLNVHLLPHTHDDVGWLKTVDQYFYGIKNDIQHAGVQYILDSVISALLADPTRRFIYVEIAFFSRWWHQQTNATQEVVRDLVRQGRLEFANGGWVMNDEAATHYGAIVDQMTLGLRFLEDTFGNDGRPRVAWHIDPFGHSREQASLFAQMGFDGFFFGRLDYQDKWVRMQKLEMEQVWRASTSLKPPTADLFTGVLPNGYNPPRNLCWDVLCVDQPLVEDPRSPEYNAKELVDYFLNVATAQGRYYRTNHTVMTMGSDFQYENANMWFKNLDKLIRLVNAQQAKGSSVHVLYSTPACYLWELNKANLTWSVKHDDFFPYADGPHQFWTGYFSSRPALKRYERLSYNFLQVCNQLEALVGLAANVGPYGSGDSAPLNEAMAVLQHHDAVSGTSRQHVANDYARQLAAGWGPCEVLLSNALARLRGFKDHFTFCQQLNISICPLSQTAARFQVIVYNPLGRKVNWMVRLPVSEGVFVVKDPNGRTVPSDVVIFPSSDSQAHPPELLFSASLPALGFSTYSVAQVPRWKPQARAPQPIPRRSWSPALTIENEHIRATFDPDTGLLMEIMNMNQQLLLPVRQTFFWYNASIGDNESDQASGAYIFRPNQQKPLPVSRWAQIHLVKTPLVQEVHQNFSAWCSQVVRLYPGQRHLELEWSVGPIPVGDTWGKEVISRFDTPLETKGRFYTDSNGREILERRRDYRPTWKLNQTEPVAGNYYPVNTRIYITDGNMQLTVLTDRSQGGSSLRDGSLELMVHRRLLKDDGRGVSEPLMENGSGAWVRGRHLVLLDTAQAAAAGHRLLAEQEVLAPQVVLAPGGGAAYNLGAPPRTQFSGLRRDLPPSVHLLTLASWGPEMVLLRLEHQFAVGEDSGRNLSAPVTLNLRDLFSTFTITRLQETTLVANQLREAASRLKWTTNTGPTPHQTPYQLDPANITLEPMEIRTFLASVQWKEVDG

SEQ ID NO: 180 - protein, 346 aa, homo sapiens
  MISC_FEATURE: AGA
MARKSNLPVLLVPFLLCQALVRCSSPLPLVVNTWPFKNATEAAWRALASGGSALDAVESGCAMCEREQCDGSVGFGGSPDELGETTLDAMIMDGTTMDVGAVGDLRRIKNAIGVARKVLEHTTHTLLVGESATTFAQSMGFINEDLSTTASQALHSDWLARNCQPNYWRNVIPDPSKYCGPYKPPGILKQDIPIHKETEDDRGHDTIGMVVIHKTGHIAAGTSTNGIKFKIHGRVGDSPIPGAGAYADDTAGAAAATGNGDILMRFLPSYQAVEYMRRGEDPTIACQKVISRIQKHFPEFFGAVICANVTGSYGAACNKLSTFTQFSFMVYNSEKNQPTEEKVDCI

SEQ ID NO: 181 - protein, 3801 aa, homo sapiens
  MISC_FEATURE: LYST
MSTDSNSLAREFLTDVNRLCNAVVQRVEAREEEEEETHMATLGQYLVHGRGFLLLTKLNSIIDQALTCREELLTLLLSLLPLVWKIPVQEEKATDFNLPLSADIILTKEKNSSSQRSTQEKLHLEGSALSSQVSAKVNVFRKSRRQRKITHRYSVRDARKTQLSTSDSEANSDEKGIAMNKHRRPHLLHHFLTSFPKQDHPKAKLDRLATKEQTPPDAMALENSREIIPRQGSNTDILSEPAALSVISNMNNSPFDLCHVLLSLLEKVCKFDVTLNHNSPLAASVVPTLTEFLAGFGDCCSLSDNLESRVVSAGWTEEPVALIQRMLFRTVLHLLSVDVSTAEMMPENLRKNLTELLRAALKIRICLEKQPDPFAPRQKKTLQEVQEDFVFSKYRHRALLLPELLEGVLQILICCLQSAASNPFYFSQAMDLVQEFIQHHGFNLFETAVLQMEWLVLRDGVPPEASEHLKALINSVMKIMSTVKKVKSEQLHHSMCTRKRHRRCEYSHFMHHHRDLSGLLVSAFKNQVSKNPFEETADGDVYYPERCCCIAVCAHQCLRLLQQASLSSTCVQILSGVHNIGICCCMDPKSVIIPLLHAFKLPALKNFQQHILNILNKLILDQLGGAEISPKIKKAACNICTVDSDQLAQLEETLQGNLCDAELSSSLSSPSYRFQGILPSSGSEDLLWKWDALKAYQNFVFEEDRLHSIQIANHICNLIQKGNIVVQWKLYNYIFNPVLQRGVELAHHCQHLSVTSAQSHVCSHHNQCLPQDVLQIYVKTLPILLKSRVIRDLFLSCNGVSQIIELNCLNGIRSHSLKAFETLIISLGEQQKDASVPDIDGIDIEQKELSSVHVGTSFHHQQAYSDSPQSLSKFYAGLKEAYPKRRKTVNQDVHINTINLFLCVAFLCVSKEAESDRESANDSEDTSGYDSTASEPLSHMLPCISLESLVLPSPEHMHQAADIWSMCRWIYMLSSVFQKQFYRLGGFRVCHKLIFMIIQKLFRSHKEEQGKKEGDTSVNENQDLNRISQPKRTMKEDLLSLAIKSDPIPSELGSLKKSADSLGKLELQHISSINVEEVSATEAAPEEAKLFTSQESETSLQSIRLLEALLAICLHGARTSQQKMELELPNQNLSVESILFEMRDHLSQSKVIETQLAKPLFDALLRVALGNYSADFEHNDAMTEKSHQSAEELSSQPGDFSEEAEDSQCCSFKLLVEEEGYEADSESNPEDGETQDDGVDLKSETEGFSASSSPNDLLENLTQGEIIYPEICMLELNLLSASKAKLDVLAHVFESFLKIIRQKEKNVFLLMQQGTVKNLLGGFLSILTQDDSDFQACQRVLVDLLVSLMSSRTCSEELTLLLRIFLEKSPCTKILLLGILKIIESDTTMSPSQYLTFPLLHAPNLSNGVSSQKYPGILNSKAMGLLRRARVSRSKKEADRESFPHRLLSSWHIAPVHLPLLGQNCWPHLSEGFSVSLWFNVECIHEAESTTEKGKKIKKRNKSLILPDSSFDGTESDRPEGAEYINPGERLIEEGCIHIISLGSKALMIQVWADPHNATLIFRVCMDSNDDMKAVLLAQVESQENIFLPSKWQHLVLTYLQQPQGKRRIHGKISIWVSGQRKPDVTLDFMLPRKTSLSSDSNKTFCMIGHCLSSQEEFLQLAGKWDLGNLLLFNGAKVGSQEAFYLYACGPNHTSVMPCKYGKPVNDYSKYINKEILRCEQIRELFMTKKDVDIGLLIESLSVVYTTYCPAQYTIYEPVIRLKGQMKTQLSQRPFSSKEVQSILLEPHHLKNLQPTEYKTIQGILHEIGGTGIFVFLFARVVELSSCEETQALALRVILSLIKYNQQRVHELENCNGLSMIHQVLIKQKCIVGFYILKTLLEGCCGEDIIYMNENGEFKLDVDSNAIIQDVKLLEELLLDWKIWSKAEQGVWETLLAALEVLIRADHHQQMFNIKQLLKAQVVHHFLLTCQVLQEYKEGQLTPMPREVCRSFVKIIAEVLGSPPDLELLTIIFNFLLAVHPPTNTYVCHNPTNFYFSLHIDGKIFQEKVRSIMYLRHSSSGGRSLMSPGFMVISPSGFTASPYEGENSSNIIPQQMAAHMLRSRSLPAFPTSSLLTQSQKLTGSLGCSIDRLQNIADTYVATQSKKQNSLGSSDTLKKGKEDAFISSCESAKTVCEMEAVLSAQVSVSDVPKGVLGFPVVKADHKQLGAEPRSEDDSPGDESCPRRPDYLKGLASFQRSHSTIASLGLAFPSQNGSAAVGRWPSLVDRNTDDWENFAYSLGYEPNYNRTASAHSVTEDCLVPICCGLYELLSGVLLILPDVLLEDVMDKLIQADTLLVLVNHPSPAIQQGVIKLLDAYFARASKEQKDKFLKNRGFSLLANQLYLHRGTQELLECFIEMFFGRHIGLDEEFDLEDVRNMGLFQKWSVIPILGLIETSLYDNILLHNALLLLLQILNSCSKVADMLLDNGLLYVLCNTVAALNGLEKNIPMSEYKLLACDIQQLFIAVTIHACSSSGSQYFRVIEDLIVMLGYLQNSKNKRTQNMAVALQLRVLQAAMEFIRTTANHDSENLTDSLQSPSAPHHAVVQKRKSIAGPRKFPLAQTESLLMKMRSVANDELHVMMQRRMSQENPSQATETELAQRLQRLTVLAVNRIIYQEFNSDIIDILRTPENVTQSKTSVFQTEISEENIHHEQSSVFNPFQKEIFTYLVEGFKVSIGSSKASGSKQQWTKILWSCKETFRMQLGRLLVHILSPAHAAQERKQIFEIVHEPNHQEILRDCLSPSLQHGAKLVLYLSELIHNHQGELTEEELGTAELLMNALKLCGHKCIPPSASTKADLIKMIKEEQKKYETEEGVNKAAWQKTVNNNQQSLFQRLDSKSKDISKIAADITQAVSLSQGNERKKVIQHIRGMYKVDLSASRHWQELIQQLTHDRAVWYDPIYYPTSWQLDPTEGPNRERRRLQRCYLTIPNKYLLRDRQKSEDVVKPPLSYLFEDKTHSSFSSTVKDKAASESIRVNRRCISVAPSRETAGELLLGKCGMYFVEDNASDTVESSSLQGELEPASFSWTYEEIKEVHKRWWQLRDNAVEIFLTNGRTLLLAFDNTKVRDDVYHNILTNNLPNLLEYGNITALTNLWYTGQITNFEYLTHLNKHAGRSFNDLMQYPVFPFILADYVSETLDLNDLLIYRNLSKPIAVQYKEKEDRYVDTYKYLEEEYRKGAREDDPMPPVQPYHYGSHYSNSGTVLHFLVRMPPFTKMFLAYQDQSFDIPDRTFHSTNTTWRLSSFESMTDVKELIPEFFYLPEFLVNREGFDFGVRQNGERVNHVNLPPWARNDPRLFILIHRQALESDYVSQNICQWIDLVFGYKQKGKASVQAINVFHPATYFGMDVSAVEDPVQRRALETMIKTYGQTPRQLFHMAHVSRPGAKLNIEGELPAAVGLLVQFAFRETREQVKEITYPSPLSWIKGLKWGEYVGSPSAPVPVVCFSQPHGERFGSLQALPTRAICGLSRNFCLLMTYSKEQGVRSMNSTDIQWSAILSWGYADNILRLKSKQSEPPVNFIQSSQQYQVTSCAWVPDSCQLFTGSKCGVITAYTNRFTSSTPSEIEMETQIHLYGHTEEITSLFVCKPYSILISVSRDGTCIIWDLNRLCYVQSLAGHKSPVTAVSASETSGDIATVCDSAGGGSDLRLWTVNGDLVGHVHCREIICSVAFSNQPEGVSINVIAGGLENGIVRLWSTWDLKPVREITFPKSNKPIISLTFSCDGHHLYTANSDGTVIAWCRKDQQRLKQPMFYSFLSSYAAG

SEQ ID NO: 182 - protein, 367 aa, homo sapiens
  MISC_FEATURE: CTNS
MIRNWLTIFILFPLKLVEKCESSVSLTVPPVVKLENGSSTNVSLTLRPPLNATLVITFEITFRSKNITILELPDEVVVPPGVTNSSFQVTSQNVGQLTVYLHGNHSNQTGPRIRFLVIRSSAISIINQVIGWIYFVAWSISFYPQVIMNWRRKSVIGLSFDFVALNLTGFVAYSVFNIGLLWVPYIKEQFLLKYPNGVNPVNSNDVFFSLHAVVLTLIIIVQCCLYERGGQRVSWPAIGFLVLAWLFAFVTMIVAAVGVTTWLQFLFCFSYIKLAVTLVKYFPQAYMNFYYKSTEGWSIGNVLLDFTGGSFSLLQMFLQSYNNDQWTLIFGDPTKFGLGVFSIVFDVVFFIQHFCLYRKRPGYDQLN

SEQ ID NO: 183 - protein, 410 aa, homo sapiens
  MISC_FEATURE: LAMP2
MVCFRLFPVPGSGLVLVCLVLGAVRSYALELNLTDSENATCLYAKWQMNFTVRYETTNKTYKTVTISDHGTVTYNGSICGDDQNGPKIAVQFGPGFSWIANFTKAASTYSIDSVSFSYNTGDNTTFPDAEDKGILTVDELLAIRIPLNDLFRCNSLSTLEKNDVVQHYWDVLVQAFVQNGTVSTNEFLCDKDKTSTVAPTIHTTVPSPTTTPTPKEKPEAGTYSVNNGNDTCLLATMGLQLNITQDKVASVININPNTTHSTGSCRSHTALLRLNSSTIKYLDFVFAVKNENRFYLKEVNISMYLVNGSVFSIANNNLSYWDAPLGSSYMCNKEQTVSVSGAFQINTFDLRVQPFNVTQGKYSTAQDCSADDDNFLVPIAVGAALAGVLILVLLAYFIGLKHHHAGYEQF

SEQ ID NO: 184 - protein, 429 aa, homo sapiens
  MISC_FEATURE: GLA
MQLRNPELHLGCALALRFLALVSWDIPGARALDNGLARTPTMGWLHWERFMCNLDCQEEPDSCISEKLFMEMAELMVSEGWKDAGYEYLCIDDCWMAPQRDSEGRLQADPQRFPHGIRQLANYVHSKGLKLGIYADVGNKTCAGFPGSFGYYDIDAQTFADWGVDLLKFDGCYCDSLENLADGYKHMSLALNRTGRSIVYSCEWPLYMWPFQKPNYTEIRQYCNHWRNFADIDDSWKSIKSILDWTSFNQERIVDVAGPGGWNDPDMLVIGNFGLSWNQQVTQMALWAIMAAPLFMSNDLRHISPQAKALLQDKDVIAINQDPLGKQGYQLRQGDNFEVWERPLSGLAWAVAMINRQEIGGPRSYTIAVASLGKGVACNPACFITQLLPVKRKLGFYEWTSRLRSHINPTGTVLLQLENTMQMSLKDLL

SEQ ID NO: 185 - protein, 480 aa, homo sapiens
  MISC_FEATURE: CTSA
MIRAAPPPLFLLLLLLLLLVSWASRGEAAPDQDEIQRLPGLAKQPSFRQYSGYLKGSGSKHLHYWFVESQKDPENSPVVLWLNGGPGCSSLDGLLTEHGPFLVQPDGVTLEYNPYSWNLIANVLYLESPAGVGFSYSDDKFYATNDTEVAQSNFEALQDFFRLFPEYKNNKLFLTGESYAGIYIPTLAVLVMQDPSMNLQGLAVGNGLSSYEQNDNSLVYFAYYHGLLGNRLWSSLQTHCCSQNKCNFYDNKDLECVTNLQEVARIVGNSGLNIYNLYAPCAGGVPSHFRYEKDTVVVQDLGNIFTRLPLKRMWHQALLRSGDKVRMDPPCTNTTAASTYLNNPYVRKALNIPEQLPQWDMCNFLVNLQYRRLYRSMNSQYLKLLSSQKYQILLYNGDVDMACNFMGDEWFVDSLNQKMEVQRRPWLVKYGDSGEQIAGFVKEFSHIAFLTIKGAGHMVPTDKPLAAFTMFSRFLNKQPY

SEQ ID NO: 186 - protein, 536 aa, homo sapiens
  MISC_FEATURE: GBA
MEFSSPSREECPKPLSRVSIMAGSLTGLLLLQAVSWASGARPCIPKSFGYSSVVCVCNATYCDSFDPPTFPALGTFSRYESTRSGRRMELSMGPIQANHTGTGLLLTLQPEQKFQKVKGFGGAMTDAAALNILALSPPAQNLLLKSYFSEEGIGYNIIRVPMASCDFSIRTYTYADTPDDFQLHNFSLPEEDTKLKIPLIHRALQLAQRPVSLLASPWTSPTWLKTNGAVNGKGSLKGQPGDIYHQTWARYFVKFLDAYAEHKLQFWAVTAENEPSAGLLSGYPFQCLGFTPEHQRDFIARDLGPTLANSTHHNVRLLMLDDQRLLLPHWAKVVLTDPEAAKYVHGIAVHWYLDFLAPAKATLGETHRLFPNTMLFASEACVGSKFWEQSVRLGSWDRGMQYSHSIITNLLYHVVGWTDWNLALNPEGGPNWVRNFVDSPIIVDITKDTFYKQPMFYHLGHFSKFIPEGSQRVGLVASQKNDLDAVALMHPDGSAVVVVLNRSSKDVPLTIKDPAVGFLETISPGYSIHTYLWRRQ

SEQ ID NO: 187 - protein, 952 aa, homo sapiens
  MISC_FEATURE: GAA
MGVRHPPCSHRLLAVCALVSLATAALLGHILLHDFLLVPRELSGSSPVLEETHPAHQQGASRPGPRDAQAHPGRPRAVPTQCDVPPNSRFDCAPDKAITQEQCEARGCCYIPAKQGLQGAQMGQPWCFFPPSYPSYKLENLSSSEMGYTATLTRTTPTFFPKDILTLRLDVMMETENRLHFTIKDPANRRYEVPLETPHVHSRAPSPLYSVEFSEEPFGVIVRRQLDGRVLLNTTVAPLFFADQFLQLSTSLPSQYITGLAEHLSPLMLSTSWTRITLWNRDLAPTPGANLYGSHPFYLALEDGGSAHGVFLLNSNAMDVVLQPSPALSWRSTGGILDVYIFLGPEPKSVVQQYLDVVGYPFMPPYWGLGFHLCRWGYSSTAITRQVVENMTRAHFPLDVQWNDLDYMDSRRDFTFNKDGFRDFPAMVQELHQGGRRYMMIVDPAISSSGPAGSYRPYDEGLRRGVFITNETGQPLIGKVWPGSTAFPDFTNPTALAWWEDMVAEFHDQVPFDGMWIDMNEPSNFIRGSEDGCPNNELENPPYVPGVVGGTLQAATICASSHQFLSTHYNLHNLYGLTEAIASHRALVKARGTRPFVISRSTFAGHGRYAGHWTGDVWSSWEQLASSVPEILQFNLLGVPLVGADVCGFLGNTSEELCVRWTQLGAFYPFMRNHNSLLSLPQEPYSFSEPAQQAMRKALTLRYALLPHLYTLFHQAHVAGETVARPLFLEFPKDSSTWTVDHQLLWGEALLITPVLQAGKAEVTGYFPLGTWYDLQTVPVEALGSLPPPPAAPREPAIHSEGQWVTLPAPLDTINVHLRAGYIIPLQGPGLTTTESRQQPMALAVALTKGGEARGELFWDDGESLEVLERGAYTQVIFLARNNTIVNELVRVTSEGAGLQLQKVTVLGVATAPQQVLSNGVPVSNFTYSPDTKVLDICVSLLMGEQFLVSWC

SEQ ID NO: 188 - protein, 550 aa, homo sapiens
  MISC_FEATURE: IDS
MPPPRTGRGLLWLGLVLSSVCVALGSETQANSTTDALNVLLIIVDDLRPSLGCYGDKLVRSPNIDQLASHSLLFQNAFAQQAVCAPSRVSFLTGRRPDTTRLYDFNSYWRVHAGNFSTIPQYFKENGYVTMSVGKVFHPGISSNHTDDSPYSWSFPPYHPSSEKYENTKTCRGPDGELHANLLCPVDVLDVPEGTLPDKQSTEQAIQLLEKMKTSASPFFLAVGYHKPHIPFRYPKEFQKLYPLENITLAPDPEVPDGLPPVAYNPWMDIRQREDVQALNISVPYGPIPVDFQRKIRQSYFASVSYLDTQVGRLLSALDDLQLANSTIIAFTSDHGWALGEHGEWAKYSNFDVATHVPLIFYVPGRTASLPEAGEKLFPYLDPFDSASQLMEPGRQSMDLVELVSLFPTLAGLAGLQVPPRCPVPSFHVELCREGKNLLKHFRFRDLEEDPYLPGNPRELIAYSQYPRPSDIPQWNSDKPSLKDIKIMGYSIRTIDYRYTVWVGFNPDEFLANFSDIHAGELYFVDSDPLQDHNMYNDSQGGDLFQLLMP

SEQ ID NO: 189 - protein, 653 aa, homo sapiens
  MISC_FEATURE: IDUA
MRPLRPRAALLALLASLLAAPPVAPAEAPHLVHVDAARALWPLRRFWRSTGFCPPLPHSQADQYVLSWDQQLNLAYVGAVPHRGIKQVRTHWLLELVTTRGSTGRGLSYNFTHLDGYLDLLRENQLLPGFELMGSASGHFTDFEDKQQVFEWKDLVSSLARRYIGRYGLAHVSKWNFETWNEPDHHDFDNVSMTMQGFLNYYDACSEGLRAASPALRLGGPGDSFHTPPRSPLSWGLLRHCHDGTNFFTGEAGVRLDYISLHRKGARSSISILEQEKVVAQQIRQLFPKFADTPIYNDEADPLVGWSLPQPWRADVTYAAMVVKVIAQHQNLLLANTTSAFPYALLSNDNAFLSYHPHPFAQRTLTARFQVNNTRPPHVQLLRKPVLTAMGLLALLDEEQLWAEVSQAGTVLDSNHTVGVLASAHRPQGPADAWRAAVLIYASDDTRAHPNRSVAVTLRLRGVPPGPGLVYVTRYLDNGLCSPDGEWRRLGRPVFPTAEQFRRMRAAEDPVAAAPRPLPAGGRLTLRPALRLPSLLLVHVCARPEKPPGQVTRLRALPLTQGQLVLVWSDEHVGSKCLWTYEIQFSQDGKAYTPVSRKPSTFNLFVFSPDTGAVSGSYRVRALDYWARPGPFSDPVPYLEVPVPRGPPSPGNP

SEQ ID NO: 190 - protein, 495 aa, homo sapiens
  MISC_FEATURE: ISSD
MRSPVRDLARNDGEESTDRTPLLPGAPRAEAAPVCCSARYNLAILAFFGFFIVYALRVNLSVALVDMVDSNTTLEDNRTSKACPEHSAPIKVHHNQTGKKYQWDAETQGWILGSFFYGYIITQIPGGYVASKIGGKMLLGFGILGTAVLTLFTPIAADLGVGPLIVLRALEGLGEGVTFPAMHAMWSSWAPPLERSKLLSISYAGAQLGTVISLPLSGIICYYMNWTYVFYFFGTIGIFWFLLWIWLVSDTPQKHKRISHYEKEYILSSLRNQLSSQKSVPWVPILKSLPLWAIVVAHFSYNWTFYTLLTLLPTYMKEILRFNVQENGFLSSLPYLGSWLCMILSGQAADNLRAKWNFSTLCVRRIFSLIGMIGPAVFLVAAGFIGCDYSLAVAFLTISTTLGGFCSSGFSINHLDIAPSYAGILLGITNTFATIPGMVGPVIAKSLTPDNTVGEWQTVFYIAAAINVFGAIFFTLFAKGEVQNWALNDHHGHRH

SEQ ID NO: 191 - protein, 533 aa, homo sapiens
  MISC_FEATURE: ARSB
MGPRGAASLPRGPGPRRLLLPVVLPLLLLLLLAPPGSGAGASRPPHLVFLLADDLGWNDVGFHGSRIRTPHLDALAAGGVLLDNYYTQPLCTPSRSQLLTGRYQIRTGLQHQIIWPCQPSCVPLDEKLLPQLLKEAGYTTHMVGKWHLGMYRKECLPTRRGFDTYFGYLLGSEDYYSHERCTLIDALNVTRCALDFRDGEEVATGYKNMYSTNIFTKRAIALITNHPPEKPLFLYLALQSVHEPLQVPEEYLKPYDFIQDKNRHHYAGMVSLMDEAVGNVTAALKSSGLWNNTVFIFSTDNGGQTLAGGNNWPLRGRKWSLWEGGVRGVGFVASPLLKQKGVKNRELIHISDWLPTLVKLARGHTNGTKPLDGFDVWKTISEGSPSPRIELLHNIDPNFVDSSPCPRNSMAPAKDDSSLPEYSAFNTSVHAAIRHGNWKLLTGYPGCGYWFPPPSQYNVSEIPSSDPPTKTLWLFDIDRDPEERHDLSREYPHIVTKLLSRLQFYHKHSVPVYFPAQDPRCDPKATGVWGPWM

SEQ ID NO: 192 - protein, 522 aa, homo sapiens
  MISC_FEATURE: GALNS
MAAVVAATRWWQLLLVLSAAGMGASGAPQPPNILLLLMDDMGWGDLGVYGEPSRETPNLDRMAAEGLLFPNFYSANPLCSPSRAALLTGRLPIRNGFYTTNAHARNAYTPQEIVGGIPDSEQLLPELLKKAGYVSKIVGKWHLGHRPQFHPLKHGFDEWFGSPNCHFGPYDNKARPNIPVYRDWEMVGRYYEEFPINLKTGEANLTQIYLQEALDFIKRQARHHPFFLYWAVDATHAPVYASKPFLGTSQRGRYGDAVREIDDSIGKILELLQDLHVADNTFVFFTSDNGAALISAPEQGGSNGPFLCGKQTTFEGGMREPALAWWPGHVTAGQVSHQLGSIMDLFTTSLALAGLTPPSDRAIDGLNLLPTLLQGRLMDRPIFYYRGDTLMAATLGQHKAHFWTWTNSWENFRQGIDFCPGQNVSGVTTHNLEDHTKLPLIFHLGRDPGERFPLSFASAEYQEALSRITSVVQQHQEALVPAQPQLNVCNWAVMNWAPPGCEKLGKCLTPPESIPKKCLWSH

SEQ ID NO: 193 - protein, 677 aa, homo sapiens
  MISC_FEATURE: GLB1
MPGFLVRILPLLLVLLLLGPTRGLRNATQRMFEIDYSRDSFLKDGQPFRYISGSIHYSRVPRFYWKDRLLKMKMAGLNAIQTYVPWNFHEPWPGQYQFSEDHDVEYFLRLAHELGLLVILRPGPYICAEWEMGGLPAWLLEKESILLRSSDPDYLAAVDKWLGVLLPKMKPLLYQNGGPVITVQVENEYGSYFACDFDYLRFLQKRFRHHLGDDVVLFTTDGAHKTFLKCGALQGLYTTVDFGTGSNITDAFLSQRKCEPKGPLINSEFYTGWLDHWGQPHSTIKTEAVASSLYDILARGASVNLYMFIGGTNFAYWNGANSPYAAQPTSYDYDAPLSEAGDLTEKYFALRNIIQKFEKVPEGPIPPSTPKFAYGKVTLEKLKTVGAALDILCPSGPIKSLYPLTFIQVKQHYGFVLYRTTLPQDCSNPAPLSSPLNGVHDRAYVAVDGIPQGVLERNNVITLNITGKAGATLDLLVENMGRVNYGAYINDFKGLVSNLTLSSNILTDWTIFPLDTEDAVRSHLGGWGHRDSGHHDEAWAHNSSNYTLPAFYMGNFSIPSGIPDLPQDTFIQFPGWTKGQVWINGFNLGRYWPARGPQLTLFVPQHILMTSAPNTITVLELEWAPCSSDDPELCAVTFVDRPVIGSSVTYDHPSKPVEKRLMPPPPQKNKDSWLDHV

SEQ ID NO: 194 - protein, 415 aa, homo sapiens
  MISC_FEATURE: NEU1
MTGERPSTALPDRRWGPRILGFWGGCRVWVFAAIFLLLSLAASWSKAENDFGLVQPLVTMEQLLWVSGRQIGSVDTFRIPLITATPRGTLLAFAEARKMSSSDEGAKFIALRRSMDQGSTWSPTAFIVNDGDVPDGLNLGAVVSDVETGVVFLFYSLCAHKAGCQVASTMLVWSKDDGVSWSTPRNLSLDIGTEVFAPGPGSGIQKQREPRKGRLIVCGHGTLERDGVFCLLSDDHGASWRYGSGVSGIPYGQPKQENDFNPDECQPYELPDGSVVINARNQNNYHCHCRIVLRSYDACDTLRPRDVTFDPELVDPVVAAGAVVTSSGIVFFSNPAHPEFRVNLTLRWSFSNGTSWRKETVQLWPGPSGYSSLATLEGSMDGEEQAPQLYVLYEKGRNHYTESISVAKISVYGTL

SEQ ID NO: 195 - protein, 1256 aa, homo sapiens
  MISC_FEATURE: GNPTA
MLFKLLQRQTYTCLSHRYGLYVCFLGVVVTIVSAFQFGEVVLEWSRDQYHVLFDSYRDNIAGKSFQNRLCLPMPIDVVYTWVNGTDLELLKELQQVREQMEEEQKAMREILGKNTTEPTKKSEKQLECLLTHCIKVPMLVLDPALPANITLKDLPSLYPSFHSASDIFNVAKPKNPSTNVSVVVFDSTKDVEDAHSGLLKGNSRQTVWRGYLTTDKEVPGLVLMQDLAFLSGFPPTFKETNQLKTKLPENLSSKVKLLQLYSEASVALLKLNNPKDFQELNKQTKKNMTIDGKELTISPAYLLWDLSAISQSKQDEDISASRFEDNEELRYSLRSIERHAPWVRNIFIVTNGQIPSWLNLDNPRVTIVTHQDVFRNLSHLPTFSSPAIESHIHRIEGLSQKFIYLNDDVMFGKDVWPDDFYSHSKGQKVYLTWPVPNCAEGCPGSWIKDGYCDKACNNSACDWDGGDCSGNSGGSRYIAGGGGTGSIGVGQPWQFGGGINSVSYCNQGCANSWLADKFCDQACNVLSCGFDAGDCGQDHFHELYKVILLPNQTHYIIPKGECLPYFSFAEVAKRGVEGAYSDNPIIRHASIANKWKTIHLIMHSGMNATTIHFNLTFQNTNDEEFKMQITVEVDTREGPKLNSTAQKGYENLVSPITLLPEAEILFEDIPKEKRFPKFKRHDVNSTRRAQEEVKIPLVNISLLPKDAQLSLNTLDLQLEHGDITLKGYNLSKSALLRSFLMNSQHAKIKNQAIITDETNDSLVAPQEKQVHKSILPNSLGVSERLQRLTFPAVSVKVNGHDQGQNPPLDLETTARFRVETHTQKTIGGNVTKEKPPSLIVPLESQMTKEKKITGKEKENSRMEENAENHIGVTEVLLGRKLQHYTDSYLGFLPWEKKKYFQDLLDEEESLKTQLAYFTDSKNTGRQLKDTFADSLRYVNKILNSKFGFTSRKVPAHMPHMIDRIVMQELQDMFPEEFDKTSFHKVRHSEDMQFAFSYFYYLMSAVQPLNISQVFDEVDTDQSGVLSDREIRTLATRIHELPLSLQDLTGLEHMLINCSKMLPADITQLNNIPPTQESYYDPNLPPVTKSLVTNCKPVTDKIHKAYKDKNKYRFEIMGEEEIAFKMIRTNVSHVVGQLDDIRKNPRKFVCLNDNIDHNHKDAQTVKAVLRDFYESMFPIPSQFELPREYRNRFLHMHELQEWRAYRDKLKFWTHCVLATLIMFTIFSFFAEQLIALKRKIFPRRRIHKEASPNRIRV

SEQ ID NO: 196 - protein, 374 aa, homo sapiens
  MISC_FEATURE: SUMF1
MAAPALGLVCGRCPELGLVLLLLLLSLLCGAAGSQEAGTGAGAGSLAGSCGCGTPQRPGAHGSSAAAHRYSREANAPGPVPGERQLAHSKMVPIPAGVFTMGTDDPQIKQDGEAPARRVTIDAFYMDAYEVSNTEFEKFVNSTGYLTEAEKFGDSFVFEGMLSEQVKTNIQQAVAAAPWWLPVKGANWRHPEGPDSTILHRPDHPVLHVSWNDAVAYCTWAGKRLPTEAEWEYSCRGGLHNRLFPWGNKLQPKGQHYANIWQGEFPVTNTGEDGFQGTAPVDAFPPNGYGLYNIVGNAWEWTSDWWTVHHSVEETLNPKGPPSGKDRVKKGGSYMCHRSYCYRYRCAARSQNTPDSSASNLGFRCAADRLPTMD

SEQ ID NO: 197 - protein, 631 aa, homo sapiens
  MISC_FEATURE: SMPD1
MPRYGASLRQSCPRSGREQGQDGTAGAPGLLWMGLVLALALALALALALSDSRVLWAPAEAHPLSPQGHPARLHRIVPRLRDVFGWGNLTCPICKGLFTAINLGLKKEPNVARVGSVAIKLCNLLKIAPPAVCQSIVHLFEDDMVEVWRRSVLSPSEACGLLLGSTCGHWDIFSSWNISLPTVPKPPPKPPSPPAPGAPVSRILFLTDLHWDHDYLEGTDPDCADPLCCRRGSGLPPASRPGAGYWGEYSKCDLPLRTLESLLSGLGPAGPFDMVYWTGDIPAHDVWHQTRQDQLRALTTVTALVRKFLGPVPVYPAVGNHESTPVNSFPPPFIEGNHSSRWLYEAMAKAWEPWLPAEALRTLRIGGFYALSPYPGLRLISLNMNFCSRENFWLLINSTDPAGQLQWLVGELQAAEDRGDKVHIIGHIPPGHCLKSWSWNYYRIVARYENTLAAQFFGHTHVDEFEVFYDEETLSRPLAVAFLAPSATTYIGLNPGYRVYQIDGNYSGSSHVVLDHETYILNLTQANIPGAIPHWQLLYRARETYGLPNTLPTAWHNLVYRMRGDMQLFQTFWFLYHKGHPPSEPCGTPCRLATLCAQLSARADSPALCRHLMPDGSLPEAQSLWPRPLFC

SEQ ID NO: 198 - protein, 1278 aa, homo sapiens
  MISC_FEATURE: NPC1
MTARGLALGLLLLLLCPAQVFSQSCVWYGECGIAYGDKRYNCEYSGPPKPLPKDGYDLVQELCPGFFFGNVSLCCDVRQLQTLKDNLQLPLQFLSRCPSCFYNLLNLFCELTCSPRQSQFLNVTATEDYVDPVTNQTKTNVKELQYYVGQSFANAMYNACRDVEAPSSNDKALGLLCGKDADACNATNWIEYMFNKDNGQAPFTITPVFSDFPVHGMEPMNNATKGCDESVDEVTAPCSCQDCSIVCGPKPQPPPPPAPWTILGLDAMYVIMWITYMAFLLVFFGAFFAVWCYRKRYFVSEYTPIDSNIAFSVNASDKGEASCCDPVSAAFEGCLRRLFTRWGSFCVRNPGCVIFFSLVFITACSSGLVFVRVTTNPVDLWSAPSSQARLEKEYFDQHFGPFFRTEQLIIRAPLTDKHIYQPYPSGADVPFGPPLDIQILHQVLDLQIAIENITASYDNETVTLQDICLAPLSPYNTNCTILSVLNYFQNSHSVLDHKKGDDFFVYADYHTHFLYCVRAPASLNDTSLLHDPCLGTFGGPVFPWLVLGGYDDQNYNNATALVITFPVNNYYNDTEKLQRAQAWEKEFINFVKNYKNPNLTISFTAERSIEDELNRESDSDVFTVVISYAIMFLYISLALGHMKSCRRLLVDSKVSLGIAGILIVLSSVACSLGVFSYIGLPLTLIVIEVIPFLVLAVGVDNIFILVQAYQRDERLQGETLDQQLGRVLGEVAPSMFLSSFSETVAFFLGALSVMPAVHTFSLFAGLAVFIDFLLQITCFVSLLGLDIKRQEKNRLDIFCCVRGAEDGTSVQASESCLFRFFKNSYSPLLLKDWMRPIVIAIFVGVLSFSIAVLNKVDIGLDQSLSMPDDSYMVDYFKSISQYLHAGPPVYFVLEEGHDYTSSKGQNMVCGGMGCNNDSLVQQIFNAAQLDNYTRIGFAPSSWIDDYFDWVKPQSSCCRVDNITDQFCNASVVDPACVRCRPLTPEGKQRPQGGDFMRFLPMFLSDNPNPKCGKGGHAAYSSAVNILLGHGTRVGATYFMTYHTVLQTSADFIDALKKARLIASNVTETMGINGSAYRVFPYSVFYVFYEQYLTIIDDTIFNLGVSLGAIFLVTMVLLGCELWSAVIMCATIAMVLVNMFGVMWLWGISLNAVSLVNLVMSCGISVEFCSHITRAFTVSMKGSRVERAEEALAHMGSSVFSGITLTKFGGIVVLAFAKSQIFQIFYFRMYLAMVLLGATHGLIFLPVLLSYIGPSVNKAKSCATEERYKGTERERLLNF

SEQ ID NO: 199 - protein, 151 aa, homo sapiens
  MISC_FEATURE: NPC2
MRFLAATFLLLALSTAAQAEPVQFKDCGSVDGVIKEVNVSPCPTQPCQLSKGQSYSVNVTFTSNIQSKSSKAVVHGILMGVPVPFPIPEPDGCKSGINCPIQKDKTYSYLNKLPVKSEYPSIKLVVEWQLQDDKNQSLFCWEIPVQIVSHL

SEQ ID NO: 200 - protein, 329 aa, homo sapiens
  MISC_FEATURE: CTSK
MWGLKVLLLPVVSFALYPEEILDTHWELWKKTHRKQYNNKVDEISRRLIWEKNLKYISIHNLEASLGVHTYELAMNHLGDMTSEEVVQKMTGLKVPLSHSRSNDTLYIPEWEGRAPDSVDYRKKGYVTPVKNQGQCGSCWAFSSVGALEGQLKKKTGKLLNLSPQNLVDCVSENDGCGGGYMTNAFQYVQKNRGIDSEDAYPYVGQEESCMYNPTGKAAKCRGYREIPEGNEKALKRAVARVGPVSVAIDASLTSFQFYSKGVYYDESCNSDNLNHAVLAVGYGIQKGNKHWIIKNSWGENWGNKGYILMARNKNNACGIANLASFPKM

SEQ ID NO: 201 - protein, 552 aa, homo sapiens
  MISC_FEATURE: GNS
MRLLPLAPGRLRRGSPRHLPSCSPALLLLVLGGCLGVFGVAAGTRRPNVVLLLTDDQDEVLGGMTPLKKTKALIGEMGMTFSSAYVPSALCCPSRASILTGKYPHNHHVVNNTLEGNCSSKSWQKIQEPNTFPAILRSMCGYQTFFAGKYLNEYGAPDAGGLEHVPLGWSYWYALEKNSKYYNYTLSINGKARKHGENYSVDYLTDVLANVSLDFLDYKSNFEPFFMMIATPAPHSPWTAAPQYQKAFQNVFAPRNKNFNIHGTNKHWLIRQAKTPMTNSSIQFLDNAFRKRWQTLLSVDDLVEKLVKRLEFTGELNNTYIFYTSDNGYHTGQFSLPIDKRQLYEFDIKVPLLVRGPGIKPNQTSKMLVANIDLGPTILDIAGYDLNKTQMDGMSLLPILRGASNLTWRSDVLVEYQGEGRNVTDPTCPSLSPGVSQCFPDCVCEDAYNNTYACVRTMSALWNLQYCEFDDQEVFVEVYNLTADPDQITNIAKTIDPELLGKMNYRLMMLQSCSGPTCRTPGVFDPGYRFDPRLMFSNRGSVRTRRFSKHLL

SEQ ID NO: 202 - protein, 663 aa, homo sapiens
  MISC_FEATURE: HGSNAT
MTGARASAAEQRRAGRSGQARAAERAAGMSGAGRALAALLLAASVLSAALLAPGGSSGRDAQAAPPRDLDKKRHAELKMDQALLLIHNELLWTNLTVYWKSECCYHCLFQVLVNVPQSPKAGKPSAAAASVSTQHGSILQLNDTLEEKEVCRLEYRFGEFGNYSLLVKNIHNGVSEIACDLAVNEDPVDSNLPVSIAFLIGLAVIIVISFLRLLLSLDDFNNWISKAISSRETDRLINSELGSPSRTDPLDGDVQPATWRLSALPPRLRSVDTFRGIALILMVFVNYGGGKYWYFKHASWNGLTVADLVFPWFVFIMGSSIFLSMTSILQRGCSKFRLLGKIAWRSFLLICIGIIIVNPNYCLGPLSWDKVRIPGVLQRLGVTYFVVAVLELLFAKPVPEHCASERSCLSLRDITSSWPQWLLILVLEGLWLGLTFLLPVPGCPTGYLGPGGIGDFGKYPNCTGGAAGYIDRLLLGDDHLYQHPSSAVLYHTEVAYDPEGILGTINSIVMAFLGVQAGKILLYYKARTKDILIRFTAWCCILGLISVALTKVSENEGFIPVNKNLWSLSYVTTLSSFAFFILLVLYPVVDVKGLWTGTPFFYPGMNSILVYVGHEVFENYFPFQWKLKDNQSHKEHLTQNIVATALWVLIAYILYRKKIFWKI

SEQ ID NO: 203 - protein, 743 aa, homo sapiens
  MISC_FEATURE: NAGLU
MEAVAVAAAVGVLLLAGAGGAAGDEAREAAAVRALVARLLGPGPAADFSVSVERALAAKPGLDTYSLGGGGAARVRVRGSTGVAAAAGLHRYLRDFCGCHVAWSGSQLRLPRPLPAVPGELTEATPNRYRYYQNVCTQSYSFVWWDWARWEREIDWMALNGINLALAWSGQEAIWQRVYLALGLTQAEINEFFTGPAFLAWGRMGNLHTWDGPLPPSWHIKQLYLQHRVLDQMRSFGMTPVLPAFAGHVPEAVTRVFPQVNVTKMGSWGHFNCSYSCSFLLAPEDPIFPIIGSLFLRELIKEFGTDHIYGADTFNEMQPPSSEPSYLAAATTAVYEAMTAVDTEAVWLLQGWLFQHQPQFWGPAQIRAVLGAVPRGRLLVLDLFAESQPVYTRTASFQGQPFIWCMLHNFGGNHGLFGALEAVNGGPEAARLFPNSTMVGTGMAPEGISQNEVVYSLMAELGWRKDPVPDLAAWVTSFAARRYGVSHPDAGAAWRLLLRSVYNCSGEACRGHNRSPLVRRPSLQMNTSIWYNRSDVFEAWRLLLTSAPSLATSPAFRYDLLDLTRQAVQELVSLYYEEARSAYLSKELASLLRAGGVLAYELLPALDEVLASDSRFLLGSWLEQARAAAVSEAEADFYEQNSRYQLTLWGPEGNILDYANKQLAGLVANYYTPRWRLFLEALVDSVAQGIPFQQHQFDKNVFQLEQAFVLSKQRYPSQPRGDTVDLAKKIFLKYYPRWVAGSW

SEQ ID NO: 204 - protein, 502 aa, homo sapiens
  MISC_FEATURE: SGSH
MSCPVPACCALLLVLGLCRARPRNALLLLADDGGFESGAYNNSAIATPHLDALARRSLLFRNAFTSVSSCSPSRASLLTGLPQHQNGMYGLHQDVHHFNSFDKVRSLPLLLSQAGVRTGIIGKKHVGPETVYPFDFAYTEENGSVLQVGRNITRIKLLVRKFLQTQDDRPFFLYVAFHDPHRCGHSQPQYGTFCEKFGNGESGMGRIPDWTPQAYDPLDVLVPYFVPNTPAARADLAAQYTTVGRMDQGVGLVLQELRDAGVLNDTLVIFTSDNGIPFPSGRTNLYWPGTAEPLLVSSPEHPKRWGQVSEAYVSLLDLTPTILDWFSIPYPSYAIFGSKTIHLTGRSLLPALEAEPLWATVFGSQSHHEVTMSYPMRSVQHRHFRLVHNLNFKMPFPIDQDFYVSPTFQDLLNRTTAGQPTGWYKDLRHYYYRARWELYDRSRDPHETQNLATDPRFAQLLEMLRDQLAKWQWETHDPWVCAPDGVLEEKLSPQCQPLHNEL

SEQ ID NO: 205 - protein, 411 aa, homo sapiens
  MISC_FEATURE: NAGA
MLLKTVLLLGHVAQVLMLDNGLLQTPPMGWLAWERFRCNINCDEDPKNCISEQLFMEMADRMAQDGWRDMGYTYLNIDDCWIGGRDASGRLMPDPKRFPHGIPFLADYVHSLGLKLGIYADMGNFTCMGYPGTTLDKVVQDAQTFAEWKVDMLKLDGCFSTPEERAQGYPKMAAALNATGRPIAFSCSWPAYEGGLPPRVNYSLLADICNLWRNYDDIQDSWWSVLSILNWFVEHQDILQPVAGPGHWNDPDMLLIGNFGLSLEQSRAQMALWTVLAAPLLMSTDLRTISAQNMDILQNPLMIKINQDPLGIQGRRIHKEKSLIEVYMRPLSNKASALVFFSCRTDMPYRYHSSLGQLNFTGSVIYEAQDVYSGDIISGLRDETNFTVIINPSGVVMWYLYPIKNLEMSQQ

SEQ ID NO: 206 - protein, 651 aa, homo sapiens
  MISC_FEATURE: GUSB
MARGSAVAWAALGPLLWGCALGLQGGMLYPQESPSRECKELDGLWSFRADFSDNRRRGFEEQWYRRPLWESGPTVDMPVPSSFNDISQDWRLRHFVGWVWYEREVILPERWTQDLRTRVVLRIGSAHSYAIVWVNGVDTLEHEGGYLPFEADISNLVQVGPLPSRLRITIAINNTLTPTTLPPGTIQYLTDTSKYPKGYFVQNTYFDFFNYAGLQRSVLLYTTPTTYIDDITVTTSVEQDSGLVNYQISVKGSNLFKLEVRLLDAENKVVANGTGTQGQLKVPGVSLWWPYLMHERPAYLYSLEVQLTAQTSLGPVSDFYTLPVGIRTVAVTKSQFLINGKPFYFHGVNKHEDADIRGKGFDWPLLVKDFNLLRWLGANAFRTSHYPYAEEVMQMCDRYGIVVIDECPGVGLALPQFFNNVSLHHHMQVMEEVVRRDKNHPAVVMWSVANEPASHLESAGYYLKMVIAHTKSLDPSRPVTFVSNSNYAADKGAPYVDVICLNSYYSWYHDYGHLELIQLQLATQFENWYKKYQKPIIQSEYGAETIAGFHQDPPLMFTEEYQKSLLEQYHLGLDQKRRKYVVGELIWNFADFMTEQSPTRVLGNKKGIFTRQRQPKSAAFLLRERYWKIANETRYPHSVAKSQCLENSLFT

SEQ ID NO: 207 - protein, 524 aa, homo sapiens
  MISC_FEATURE: PSAP
MYALFLLASLLGAALAGPVLGLKECTRGSAVWCQNVKTASDCGAVKHCLQTVWNKPTVKSLPCDICKDVVTAAGDMLKDNATEEEILVYLEKTCDWLPKPNMSASCKEIVDSYLPVILDIIKGEMSRPGEVCSALNLCESLQKHLAELNHQKQLESNKIPELDMTEVVAPFMANIPLLLYPQDGPRSKPQPKDNGDVCQDCIQMVTDIQTAVRTNSTFVQALVEHVKEECDRLGPGMADICKNYISQYSEIAIQMMMHMQPKEICALVGFCDEVKEMPMQTLVPAKVASKNVIPALELVEPIKKHEVPAKSDVYCEVCEFLVKEVTKLIDNNKTEKEILDAFDKMCSKLPKSLSEECQEVVDTYGSSILSILLEEVSPELVCSMLHLCSGTRLPALTVHVTQPKDGGFCEVCKKLVGYLDRNLEKNSTKQEILAALEKGCSFLPDPYQKQCDQFVAEYEPVLIEILVEVMDPSFVCLKIGACPSAHKPLLGTEKCIWGPSYWCQNTETAAQCNAVEHCKRHVWN

SEQ ID NO: 208 - protein, 399 aa, homo sapiens
  MISC_FEATURE: LAL
MKMRFLGLVVCLVLWTLHSEGSGGKLTAVDPETNMNVSEIISYWGFPSEEYLVETEDGYILCLNRIPHGRKNHSDKGPKPVVFLQHGLLADSSNWVTNLANSSLGFILADAGFDVWMGNSRGNTWSRKHKTLSVSQDEFWAFSYDEMAKYDLPASINFILNKTGQEQVYYVGHSQGTTIGFIAFSQIPELAKRIKMFFALGPVASVAFCTSPMAKLGRLPDHLIKDLFGDKEFLPQSAFLKWLGTHVCTHVILKELCGNLCFLLCGFNERNLNMSRVDVYTTHSPAGTSVQNMLHWSQAVKFQKFQAFDWGSSAKNYFHYNQSYPPTYNVKDMLVPTAVWSGGHDWLADVYDVNILLTQITNLVFHESIPEWEHLDFIWGLDAPWRLYNKIINLMRKYQ

SEQ ID NO: 209 - protein, 5 aa, artificial sequence
  Caspase 2 protein sequence
VDVAD

What is claimed is:

1. A fusosome comprising:
a) a lipid bilayer comprising a fusogen; and
b) a nucleic acid that comprises:
(i) a payload gene encoding an exogenous agent; and
(ii) a positive hematopoietic stem cell (HSC)-specific regulatory element operatively linked to the payload gene, wherein the positive HSC-specific regulatory element increases expression of the payload gene in a HSC relative to an otherwise similar fusosome lacking the positive HSC-specific regulatory element.

2. The fusosome of claim 1, wherein the nucleic acid further comprises a non-target cell-specific regulatory element (NTCSRE) that is a non-HSC-specific regulatory element operatively linked to the payload gene, wherein the non-HSC-specific regulatory element decreases expression of the payload gene in a non-HSC relative to an otherwise similar fusosome lacking the non-HSC-specific regulatory element.

3. A fusosome comprising:
a) a lipid bilayer comprising a fusogen; and
b) a nucleic acid that comprises:
(i) a payload gene encoding an exogenous agent; and
(ii) a promoter operatively linked to the payload gene, wherein the promoter is chosen from a vav regulatory element, CD34, CD59, CD90, CD49f, EMCN, or TIE2 promoter.

4. A fusosome comprising:
a) a lipid bilayer comprising a fusogen; and
b) a nucleic acid that comprises:
(i) a payload gene encoding an exogenous agent; and
(ii) a non-target cell-specific regulatory element (NTCSRE) that is a non-HSC-specific regulatory element operatively linked to the payload gene, wherein the NTCSRE decreases expression of the payload gene in a non-HSC relative to an otherwise similar fusosome lacking the non-HSC-specific regulatory element.

5. The fusosome of claim 4, wherein the nucleic acid further comprises a positive HSC-specific regulatory element operatively linked to the payload gene, wherein the positive HSC-specific regulatory element increases expression of the payload gene in a HSC relative to an otherwise similar fusosome lacking the positive HSC-specific regulatory element.

6. The fusosome of any of claims 1-5, wherein the fusosome further comprises one or both of:
(i) a first exogenous or overexpressed immunosuppressive protein on the lipid bilayer; or
(ii) a first immunostimulatory protein that is absent or present at reduced levels, optionally wherein the reduced level is reduced by at least 10%, 20%, 30%, 40%, 50%, 60%, 70%, 80%, or 90% compared to a fusosome generated from an otherwise similar, unmodified source cell.

7. The fusosome of any of claims 1-6, wherein the payload gene is a gene that treats a hematopoietic stem-cell related disease or disorder, optionally wherein the disease or disorder is a genetic deficiency.

8. A fusosome comprising:
a) a lipid bilayer comprising a fusogen;
b) a nucleic acid that comprises a payload gene encoding an exogenous agent for treating a hematopoietic stem-cell related disease or disorder, optionally wherein the disease or disorder is a genetic deficiency; and
c) one or both of:
(i) a first exogenous or overexpressed immunosuppressive protein on the lipid bilayer; or
(ii) a first immunostimulatory protein that is absent or present at reduced levels (e.g., reduced by at least 10%, 20%, 30%, 40%, 50%, 60%, 70%, 80%, or 90%) compared to a fusosome generated from an otherwise similar, unmodified source cell.

9. The fusosome of any of claims 6-8, which comprises (i) and (ii).

10. The fusosome of any of claims 6-9, which comprises (i) and further comprises a second exogenous or overexpressed immunosuppressive protein on the lipid bilayer.

11. The fusosome of any of claims 6-10, which comprises (ii) and further comprises a second immunostimulatory protein that is absent or present at reduced levels, optionally wherein the reduced level is reduced by at least 10%, 20%, 30%, 40%, 50%, 60%, 70%, 80%, or 90% compared to a fusosome generated from an otherwise similar, unmodified source cell.

12. The fusosome of any of claims 8-11, wherein the nucleic acid further comprises a positive HSC-specific regulatory element operatively linked to the payload gene, wherein the positive HSC-specific regulatory element increases expression of the payload gene in a HSC relative to an otherwise similar fusosome lacking the positive HSC-specific regulatory element.

13. The fusosome of any of claims 6-10, wherein the nucleic acid further comprises a non-target cell-specific regulatory element (NTCSRE) that is a non-HSC-specific regulatory element operatively linked to the payload gene, wherein the non-HSC-specific regulatory element decreases expression of the payload gene in a non-HSC relative to an otherwise similar fusosome lacking the non-HSC-specific regulatory element.

14. The fusosome of any of claims 6-13, wherein, when administered to a subject, one or more of:
i) the fusosome does not produce a detectable antibody response or antibodies against the fusosome are present at a level of less than 10%, 5%, 4%, 3%, 2%, or 1% above a background level;
ii) the fusosome does not produce a detectable cellular immune response, or a cellular immune response against the fusosome is present at a level of less than 10%, 5%, 4%, 3%, 2%, or 1% above a background level;
iii) the fusosome does not produce a detectable innate immune response, e.g., complement activation, or the innate immune response against the fusosome is present at a level of less than 10%, 5%, 4%, 3%, 2%, or 1% above a background level;
iv) less than 10%, 5%, 4%, 3%, 2%, or 1% of fusosomes are inactivated by serum;
v) a target cell that has received the exogenous agent from the fusosome does not produce a detectable antibody response, or antibodies against the target cell are present at a level of less than 10%, 5%, 4%, 3%, 2%, or 1% above a background level; or
vi) a target cell that has received the exogenous agent from the fusosome does not produce a detectable cellular immune response, or a cellular response against the target cell is present at a level of less than 10%, 5%, 4%, 3%, 2%, or 1% above a background level.

15. The fusosome of claim 14, wherein the background level is the corresponding level in the same subject prior to administration of the fusosome.

16. The fusosome of any of claims 6-15, wherein the immunosuppressive protein) is a complement regulatory protein or CD47.

17. The fusosome of any of claims 6-16, wherein the immunostimulatory protein is an MHC I or MHC II protein.

18. The fusosome of any of claim 1-17, wherein one or more of:
i) the fusosome fuses at a higher rate with a HSC than with a non-HSC, optionally wherein the higher rate is by at least at least 1%, 2%, 3%, 4%, 5%, 10%, 20%, 30%, 40%, 50%, 60%, 70%, 80%, 90%, 2-fold, 3-fold, 4-fold, 5-fold, 10-fold, 20-fold, 50-fold, or 100-fold;
ii) the fusosome fuses at a higher rate with aHSC than with another fusosome, optionally wherein the higher rate is by at least 10%, 20%, 30%, 40%, 50%, 60%, 70%, 80%, or 90%, 2-fold, 3-fold, 4-fold, 5-fold, 10-fold, 20-fold, 50-fold, or 100-fold;
iii) the fusosome fuses with HSCs at a rate such that an agent in the fusosome is delivered to at least 10%, 20%, 30%, 40%, 50%, 60%, 70%, 80%, or 90%, of HSCs after 24, 48, or 72 hours;
iv) the fusosome delivers the nucleic acid to a HSC at a higher rate than to a non-tHSC, optionally wherein the higher rate is by at least at least 1%, 2%, 3%, 4%, 5%, 10%, 20%, 30%, 40%, 50%, 60%, 70%, 80%, 90%, 2-fold, 3-fold, 4-fold, 5-fold, 10-fold, 20-fold, 50-fold, or 100-fold;
v) the fusosome delivers the nucleic acid to a HSC at a higher rate than to another fusosome, optionally wherein the higher rate is by at least 10%, 20%, 30%, 40%, 50%, 60%, 70%, 80%, or 90%, 2-fold, 3-fold, 4-fold, 5-fold, 10-fold, 20-fold, 50-fold, or 100-fold; or
vi) the fusosome delivers the nucleic acid to a HSC at a rate such that an agent in the fusosome is delivered to at least 10%, 20%, 30%, 40%, 50%, 60%, 70%, 80%, or 90%, of HSCs after 24, 48, or 72 hours.

19. The fusosome of any of claims 1-18, wherein the exogenous agent is chosen from:
ADA, IL2RG, JAK3, IL7R, HBB, F8, F9, WAS, CYBA, CYBB, NCF1, NCF2, NCF4, UROS, TCIRG1, CLCN7, MPL, ITGA2B, ITGB3, ITGB2, PKLR, SLC25A38, RAG1, RAG2, FANCA, FANCC, FANCG, or ABCD1; or the exogenous agent is chosen from: MAN2B1, AGA, LYST, CTNS, LAMP2, GLA, CTSA, GBA, GAA, IDS, IDUA, ISSD, ARSB, GALNS, GLB1, NEU1, GNPTA, SUMF1, SMPD1, NPC1, NPC2, CTSK, GNS, HGSNAT, NAGLU, SGSH, NAGA, GUSB, PSAP, or LAL.

20. The fusosome of any of claims 1-19, wherein the exogenous agent is selected from wherein the exogenous agent is chosen from: ADA, IL2RG, JAK3, IL7R, HBB, F8, F9, WAS, CYBA, CYBB, NCF1, NCF2, NCF4, UROS, TCIRG1, CLCN7, MPL, ITGA2B, ITGB3, ITGB2, PKLR, SLC25A38, RAG1, RAG2, FANCA, FANCC, FANCG, or ABCD1.

21. The fusosome of any of claims 1-20, wherein the payload gene encodes an exogenous agent comprising the sequence set forth in any one of SEQ ID NOS: 151-178, a functional fragment thereof, or a functional variant thereof comprising an amino acid sequence having at least 70%, 75%, 80%, 85%, 90%, 95%, 96%, 97%, 98%, or 99%, identity to an amino acid sequence set forth in any one of SEQ ID NOS: 151-178.

22. The fusosome of any of claims 1-19, wherein the exogenous agent is selected from wherein the exogenous agent is chosen from: MAN2B1, AGA, LYST, CTNS, LAMP2, GLA, CTSA, GBA, GAA, IDS, IDUA, ISSD, ARSB, GALNS, GLB1, NEU1, GNPTA, SUMF1, SMPD1, NPC1, NPC2, CTSK, GNS, HGSNAT, NAGLU, SGSH, NAGA, GUSB, PSAP, or LAL.

23. The fusosome of any of claims 1-19 and 22, wherein the payload gene encodes an exogenous agent comprising the sequence set forth in any one of SEQ ID NOS: 179-208, a functional fragment thereof, or a functional variant thereof comprising an amino acid sequence having at least 70%, 75%, 80%, 85%, 90%, 95%, 96%, 97%, 98%, or 99%, identity to an amino acid sequence set forth in any one of SEQ ID NOS: 179-208.

24. The fusosome of any of claims 1-23, wherein the fusogen targets a hematopoietic stem cell (HSC), optionally wherein the HSC is a myeloid-lymphoid balanced HSC, a myeloid-biased HSC, a lymphoid-biased HSC, a platelet-biased HSC, a platelet-myeloid-biased HSC, a long-term repopulating HSC, an intermediate-term repopulating HSC, or a short-term repopulating HSC.

25. The fusosome of any of claims 1-24, wherein the fusogen is a viral envelope protein.

26. The fusosome of any of claims 1-25, wherein the fusogen comprises VSV-G.

27. The fusosome of any of claims 1-26, wherein the fusogen comprises a sequence chosen from Nipah virus F and G proteins, measles virus F and H proteins, tupaia paramyxovirus F and H proteins, paramyxovirus F and G proteins or F and H proteins or F and HN proteins, Hendra virus F and G proteins, Henipavirus F and G proteins, Morbilivirus F and H proteins, respirovirus F and HN protein, a Sendai virus F and HN protein, rubulavirus F and HN proteins, or avulavirus F and HN proteins, or a derivative thereof, or any combination thereof.

28. The fusosome of any of claims 1-24 and 27, wherein the fusogen comprises a domain of at least 100 amino acids in length having at least 80%, 85%, 90%, 95%, 96%, 97%, 98%, or 99% sequence identity to a wild-type paramyxovirus fusogen, optionally wherein the wild-type paramyxovirus fusogen is set forth in any one of SEQ ID NOS: 1-133.

29. The fusosome of claim 27, wherein the wild-type paramyxovirus is a Nipah virus, optionally wherein the Nipah virus is a henipavirus.

30. The fusosome of any of claims 1-29, wherein the fusogen is re-targeted for delivery to a a hematopoietic stem cell (HSC), optionally wherein the HSC is a myeloid-lymphoid balanced HSC, a myeloid-biased HSC, a lymphoid-biased HSC, a platelet-biased HSC, a platelet-myeloid-biased HSC, a long-term repopulating HSC, an intermediate-term repopulating HSC, or a short-term repopulating HSC.

31. The fusosome of any claims 1, 2, 5, 6, 7 and 12-30, wherein the positive HSC-specific regulatory element comprises a HSC-specific promoter, a HSC-specific enhancer, a HSC-specific splice site, a HSC-specific site extending half-life of an RNA or protein, a HSC-specific mRNA nuclear export promoting site, a HSC-specific translational enhancing site, or a HSC-specific post-translational modification site.

32. The fusosome of any claims 1, 2, 5, 6, 7 and 12-31, wherein the positive HSC-specific regulatory element comprises a HSC-specific promoter.

33. The fusosome of claim 31 or 32, wherein the positive HSC-specific regulatory element comprises a promoter chosen from a vav regulatory element, CD34, CD59, CD90, CD49f, EMCN, or TIE2 promoter.

34. The fusosome of any of claim 2, 4-7, or 13-33, wherein the NTCSRE comprises a non-target cell-specific miRNA recognition sequence, non-target cell-specific protease recognition site, non-target cell-specific ubiquitin ligase site, non-target cell-specific transcriptional repression site, or non-target cell-specific epigenetic repression site.

35. The fusosome of any of claim 2, 4-7, or 13-34, wherein the NTCSRE comprises a tissue-specific miRNA recognition sequence, tissue-specific protease recognition site, tissue-specific ubiquitin ligase site, tissue-specific transcriptional repression site, or tissue-specific epigenetic repression site.

36. The fusosome of any of claim 2, 4-7, or 13-35, wherein the NTCSRE comprises a non-HSC-specific miRNA recognition sequence, non-HSC-specific protease recognition site, non-HSC-specific ubiquitin ligase site, non-HSC-specific transcriptional repression site, or non-HSC-specific epigenetic repression site.

37. The fusosome of any of claim 2, 4-7, or 13-36, wherein the NTCSRE comprises a non-HSC-specific miRNA recognition sequence and the miRNA recognition sequence is able to be bound by one or more of miR-126, miR-223, miR-181a, miR-181a-2, miR-155, or miR-150, optionally wherein the the miRNA recognition sequence is able to be bound by an miRNA set forth in any of SEQ ID NOS: 140-150.

38. The fusosome of any of claims 34-37, wherein the NTCSRE is situated or encoded within a transcribed region encoding the exogenous agent, optionally wherein an RNA produced by the transcribed region comprises the miRNA recognition sequence within a UTR or coding region.

39. The fusosome of any of claims 1-38, wherein the nucleic acid comprises one or more insulator elements.

40. The fusosome of claim 39, wherein the nucleic acid comprises two insulator elements, optionally wherein the two insulator elements comprise a first insulator element upstream of the payload gene and a second insulator element downstream of the payload gene, optionally wherein the first insulator element and second insulator element comprise the same or different sequences.

41. The fusosome of any of claims 1-40, wherein the fusosome is a retroviral vector particle.

42. The fusosome of any of claims 1-41, wherein the nucleic acid is capable of integrating into the genome of a HSC.

43. The fusosome of any of claims 1-42, wherein the HSC cell is a myeloid-lymphoid balanced HSC, a myeloid-biased HSC, a lymphoid-biased HSC, a platelet-biased HSC, a platelet-myeloid-biased HSC, a long-term repopulating HSC, an intermediate-term repopulating HSC, or a short-term repopulating HSC.

44. A pharmaceutical composition comprising the fusosome of any of claims 1-43, and a pharmaceutically acceptable carrier, diluent, or excipient.

45. A method of delivering an exogenous agent to a subject comprising administering to the subject the fusosome of any of claims 1-43 or the pharmaceutical composition of claim 44, thereby delivering the exogenous agent to the subject.

46. A method of modulating a function, in a subjector an HSC cell, comprising contacting, an HSC cell of the subject with the fusosome of any of claims 1-43 or the pharmaceutical composition of claim 45.

47. The method of claim 46, wherein the HSC cell is a myeloid-lymphoid balanced HSC, a myeloid-biased HSC, a lymphoid-biased HSC, a platelet-biased HSC, a platelet-myeloid-biased HSC, a long-term repopulating HSC, an intermediate-term repopulating HSC, or a short-term repopulating HSC.

48. The method of claim 46 or claim 47, wherein the HSC cell is present in a subject.

49. A method of treating a genetic deficiency in a subject comprising administering to the subject the fusosome of any of claims 1-43 or the pharmaceutical composition of claim 44.

50. The method of claim 49, wherein the genetic deficiency is a genetic deficiency able to be treated by the payload gene encoding the exogenous agent.

51. The method of claim 49 or claim 50, wherein the genetic deficiency is selected from ADA SCID; X-linked SCID; Jak-3 SCID; IL7R SCID; Thalassemia Major, Sickle Cell Disease; Hemophilia A; Hemophilia B; Wiskott-Aldrich Syndrome; Chronic Granulomatous Disease; Gunther Disease; Malignant Infantile Osteoporosis; Congenital Amegakaryocytic Thrombocytopenia; Glanzmann's Thrombasthenia; Leukocyte Adhesion Deficiency; Pyruvate Kinase Deficiency; Autosomal Recessive Sideroblastic Anemia; Rag 1 Deficiency; Rag 2 Deficiency; Fanconi Anemia; X-Linked Adrenoleukodystrophy; Alpha-mannosidosis;
Aspartylgucosaminuria; Chediak-Higashi Syndrome; Cystinosis; Danon Disease; Fabry Disease;
Galactosialidosis; Gaucher Disease; Pompe Disease; Hunter Disease; Hurler Disease; or Infantile Free Sialic Acid Storage Disease; or Maroteaux-Lamy; Morquio Type A; Morquio Type B;
Mucolipidosis Type I; Mucolipidosis Type II; Multiple Sulfatase Deficiency; Niemann-Pick Disease Type A; Niemann-Pick Disease Type B; Niemann-Pick Disease Type C; Pycnodystosis;
Sanfilippo Syndrome Type A; Sanfilippo Syndrome Type B; Sanfilippo Syndrome Type C;
Sanfilippo Syndrome Type D; Schindler Disease Types I and II; Sly Disease; Sphinoglipidosis-Encephalopathy; or Wolman Disease.

52. The method of any of claims 45-51, wherein the subject is a human subject.

53. A fusosome of any of claims 1-43 or the pharmaceutical composition of claim 44 for use in treating a genetic deficiency.

54. Use of a fusosome of any of claims 1-43 or the pharmaceutical composition of claim 44 for manufacture of a medicament for use in treating a genetic deficiency.

55. The fusosome or pharmaceutical composition for use of claim 53, or the use of claim 54, wherein the genetic deficiency is a genetic deficiency able to be treated by the payload gene encoding the exogenous agent.

56. The fusosome or pharmaceutical composition for use of claim 53 or claim 55, or the use of claim 54 or claim 55, wherein the genetic deficiency is selected from ADA SCID; X-linked SCID; Jak-3 SCID; IL7R SCID; Thalassemia Major, Sickle Cell Disease; Hemophilia A;
Hemophilia B; Wiskott-Aldrich Syndrome; Chronic Granulomatous Disease; Gunther Disease;
Malignant Infantile Osteoporosis; Congenital Amegakaryocytic Thrombocytopenia;
Glanzmann's Thrombasthenia; Leukocyte Adhesion Deficiency; Pyruvate Kinase Deficiency;
Autosomal Recessive Sideroblastic Anemia; Rag 1 Deficiency; Rag 2 Deficiency; Fanconi Anemia; X-Linked Adrenoleukodystrophy; Alpha-mannosidosis; Aspartylgucosaminuria;
Chediak-Higashi Syndrome; Cystinosis; Danon Disease; Fabry Disease; Galactosialidosis;
Gaucher Disease; Pompe Disease; Hunter Disease; Hurler Disease; or Infantile Free Sialic Acid Storage Disease; or Maroteaux-Lamy; Morquio Type A; Morquio Type B; Mucolipidosis Type I;
Mucolipidosis Type II; Multiple Sulfatase Deficiency; Niemann-Pick Disease Type A; Niemann-Pick Disease Type B; Niemann-Pick Disease Type C; Pycnodystosis; Sanfilippo Syndrome Type A; Sanfilippo Syndrome Type B; Sanfilippo Syndrome Type C; Sanfilippo Syndrome Type D;
Schindler Disease Types I and II; Sly Disease; Sphinoglipidosis-Encephalopathy; or Wolman Disease.

57. A method of making the fusosome of any of claims 1-43, comprising:
a) providing a cell that comprises the nucleic acid and the fusogen;
b) culturing the cell under conditions that allow for production of the fusosome, and
c) separating, enriching, or purifying the fusosome from the cell, thereby making the fusosome.
